(19) United States
(12) Patent Application Publication
(10) Pub. No.: US 2023/0340488 A1
(43) Pub. Date: Oct. 26, 2023

(54) TREATMENT OF SKIN DISEASES AND DISORDERS USING INHIBITORS OF KALLIKREIN-RELATED PEPTIDASES (KLK)

(71) Applicants: Exicure Operating Company, Chicago, IL (US); SevenScore Pharmaceuticals, LLC, New York, NY (US)

(72) Inventors: Bart Anderson, Chicago, IL (US); Michael Mutolo, Chicago, IL (US)

(73) Assignees: Exicure Operating Company, Chicago, IL (US); SevenScore Pharmaceuticals, LLC, New York, NY (US)

(21) Appl. No.: 18/019,857

(22) PCT Filed: Aug. 6, 2021
(86) PCT No.: PCT/US2021/045084

§ 371 Date: Feb. 6, 2023

Related U.S. Application Data
(60) Provisional application No. 63/114,409, filed on Nov. 16, 2020.
(60) Provisional application No. 63/062,951, filed on Aug. 7, 2020.

(51) Int. Cl. C12N 15/113; A61K 45/06

(52) U.S. Cl. CPC C12N 15/1137; A61K 45/06; C12N 2310/3515; C12N 2310/3231; C12N 2310/11; C12N 2310/344; C12N 2320/31; C12Y 304/21008; C12N 2310/341

(57) ABSTRACT

Provided herein are compositions and methods for inhibiting the expression and/or activity of kallikrein-related peptidase (KLK) (e.g., KLK5 and KLK7) genes and/or KLK (e.g., KLK5 and KLK7) gene products using oligonucleotide-based therapy. In some embodiments, the compositions are spherical nucleic acids (SNAs) targeting a region of a KLK5 gene and/or gene product and a second synthetic oligonucleotide targeting a region of a KLK7 gene and/or a KLK7 gene product. Such compositions and methods are useful, for instance, in the treatment, prevention, and/or amelioration of diseases or disorders associated with the dysregulation of KLK function.

### RELATED APPLICATIONS

[0001] This application claims the benefit of the filing date under 35 U.S.C. § 119(e) of U.S. Provisional Application Ser. No. 63/062,951, entitled “TREATMENT OF SKIN DISEASES AND DISORDERS USING INHIBITORS OF KALLIKREIN (KLK)-RELATED PEPTIDASES”, filed on Aug. 7, 2020, and of U.S. Provisional Application Ser. No. 63/114,409, entitled “TREATMENT OF SKIN DISEASES AND DISORDERS USING INHIBITORS OF KALLIKREIN-RELATED PEPTIDASES (KLK)”, filed on Nov. 16, 2020, the contents of each of which are incorporated herein by reference in their entireties.

### BACKGROUND

[0002] Netherton syndrome (NS) is a devastating genetic disease caused by mutations in serine protease inhibitor of Kazal type (STINK) 5. SPIN K5 encodes the serine protease inhibitor lympho-epithelial Kazal-type-related inhibitor (LEKTI), which inhibits the activity of kallikrein-related peptidase (KLK) 5 and KLK7. NS has an estimated prevalence of one in 50,000-200,000, from which 1,600-6,500 patients and another 3,700-15,000 patients are estimated to suffer from NS in the United States and in Europe, respectively.

### SUMMARY

[0003] The present disclosure relates, according to some aspects, to compositions and uses thereof that decrease the expression of certain kallikrein-related peptidase (KLK) genes for the treatment of certain diseases and disorders, such as chronic skin diseases and disorders, including, but not limited to, Netherton syndrome (NS) and atopic dermatitis (AD). As disclosed herein, compositions, such as oligonucleotides (e.g., synthetic oligonucleotides) and spherical nucleic acids (SNAs) targeting KLK genes (e.g., a KLK5 gene, a KLK7 gene, and/or related KLK5 and KLK7 gene products) decrease the expression of KLK genes (e.g., mRNA levels, protein levels, etc.) by decreasing KLK gene expression and/or KLK protein to levels that promote either partially or completely one or more beneficial phenotype(s). The compositions disclosed herein can be used for the treatment, amelioration and/or elimination of one or more, or all, characteristics, conditions, and/or symptoms associated with, for instance, chronic skin diseases and disorders, including, but not limited to NS and AD.

[0004] In some embodiments, an SNA disclosed herein includes a first synthetic oligonucleotide which targets a KLK5 gene and/or a KLK5 gene product and a second synthetic oligonucleotide which targets a KLK7 gene and/or a KLK7 gene product, thereby forming a bispecific SNA which decreases KLK5 mRNA and/or KLK5 protein, as well as KLK7 mRNA and/or KLK7 protein to levels that promote either partially or completely one or more beneficial phenotype(s) for the treatment, amelioration and/or elimination of chronic skin diseases and disorders.

[0005] According to some aspects, synthetic oligonucleotides, or pharmaceutically acceptable salts thereof, are contemplated herein. In some embodiments, the synthetic oligonucleotide comprises a nucleic acid sequence complementary to or sufficiently complementary to a region of a KLK gene and/or to a region of a KLK gene product, and at least one locked nucleic acid (LNA) modification or LNA modified nucleoside, or a pharmaceutically acceptable salt thereof.

[0006] In some embodiments, the KLK gene is a KLK5 gene. In some embodiments, the KLK gene product is a KLK5 gene product. In some embodiments, the KLK gene is a KLK7 gene. In some embodiments, the KLK gene product is a KLK7 gene product.

[0007] In some embodiments, the synthetic oligonucleotide comprises a nucleic acid sequence complementary to or sufficiently complementary to a region of a kallikrein-related peptidase (KLK) 7 gene and/or to a region of a KLK7 gene product, and at least one modification chosen from a base modification, a sugar modification or an internucleoside linkage modification, or a pharmaceutically acceptable salt thereof.

[0008] In some embodiments, the synthetic oligonucleotide or the nucleic acid sequence is indirectly attached to a molecular species, in some embodiments, the molecular species is indirectly attached to the 3′-end of the synthetic oligonucleotide or the nucleic acid sequence. In some embodiments, the molecular species is indirectly attached to the 5′-end of the synthetic oligonucleotide or the nucleic acid sequence, in some embodiments, the molecular species comprises, consists essentially of, or consists of a cholesterol or a tocopherol. In some embodiments, the molecular species comprises, consists essentially of, or consists of a cholesterol. In some embodiments, the molecular species comprises, consists essentially of, or consists of (N-cholesteryl-3-aminopropyl)-triethyleneglycol-glyceryl-1-O-phosphodiester (CholTEG).

[0009] In some embodiments, the synthetic oligonucleotide further comprises a spacer. In some embodiments, the spacer comprises, consists essentially of, or consists of an oligoethylene. In some embodiments, the oligoethylene is hexaethyleneglycol (HEG). In some embodiments, the spacer comprises, consists essentially of, or consists of HEG and triethyleneglycol (TEG). In some embodiments, the spacer comprises, consists essentially of, or consists of hexa(ethyleneglycopphosphodiester-hexa(ethyleneglycoOphosphodiester (HEG-HEG). In some embodiments, the molecular species is indirectly attached to the synthetic oligonucleotide or the nucleic acid sequence through the spacer.

[0010] In some embodiments, the synthetic oligonucleotide comprises at least one phosphorothioate internucleoside linkage. In some embodiments, the synthetic oligonucleotide comprises two or more phosphorothioate internucleoside linkages, or each internucleoside linkage of the synthetic oligonucleotide is a phosphorothioate internucleoside linkage.

[0011] In some embodiments, the synthetic oligonucleotide comprises at least two modifications or modified nucleoside(s). In some embodiments, the at least two modifications or modified nucleosides are at least one of a modification or modified nucleoside chosen from a 2′-O-methyl modification (2′-O-Me) or 2′-O-Me modified nucleoside, a 2′-O-methoxyethyl (2′-MOE) modification or 2′-MOE modified nucleoside, a 2′-O-methoxyethoxy-5-methyl (5-Me-MOE) modification or 5-Me-MOE modified nucleoside, an LNA modification or LNA modified nucleoside, a 5-methyl (5-Me) modification or 5-Me modified nucleoside, a 5-methyl LNA modified nucleoside, a 7-deaza modification or 7-deaza modified nucleoside, and a 7-deaza-2′-O-methyl (7deazaOM) modification or 7deazaOM modified nucleoside.

[0012] In some embodiments, the synthetic oligonucleotide further comprises at least one modification or modified nucleoside chosen from a 5-Me modification or a 5-Me modified nucleoside, a. 7-deaza modification or 7-deaza modified nucleoside and a phosphorothioate internucleoside linkage. In some embodiments, the synthetic oligonucleotide comprises an LNA modification or an LNA modified nucleoside, a 5-Me modification or 5-Me modified nucleoside, and a phosphorothioate internucleoside linkage. In some embodiments, the synthetic oligonucleotide comprises five 5-Me modified nucleosides and six LNA modified nucleosides. In some embodiments, the synthetic oligonucleotide comprises an LNA modification or an LNA modified nucleoside, a 5-Me modification or 5-Me modified nucleoside, a 7-deaza modification or 7-deaza modified nucleoside, and a phosphorothioate internucleoside linkage. In some embodiments, the synthetic oligonucleotide comprises one 5-Me modification or 5-Me modified nucleoside, one 7-deaza modification or 7-deaza modified nucleoside and six LNA modifications or LNA modified nucleosides.

[0013] In some embodiments, the LNA modified nucleoside comprises, consists essentially of, or consists of (2′-O, 4′-C methylene)-Adenosine, 5-methyl-(2′-O, 4′-C methylene)-Cytidine, (2′-O, 4′-C methylene)-Guanosine, or 5-methyl-(2′-O, 4′-C methylene)-Uridine.

[0014] In some embodiments, the region is within an exon. In some embodiments, the region is within exon 6 of a KLK5 gene or a KLK5 gene product. In some embodiments, the region is within exon 5 of a KLK7 gene or a KLK7 gene product. In some embodiments, the region is within exon 1, exon 3, exon 4 or exon 6 of a KLK7 gene or a KLK7 gene product. In some embodiments, the region is within both exons 5 and 6 of a KLK7 gene or a KLK7 gene product.

[0015] In some embodiments, the region is within a 5′-untranslated region (UTR) or a 3′-UTR.

[0016] In some embodiments, the region is within a coding sequence.

[0017] In some embodiments, the nucleic acid sequence is 10 to 30 nucleobases or nucleosides in length. In some embodiments, the nucleic acid sequence is 15 to 22 nucleobases or nucleosides in length. In some embodiments, the nucleic acid sequence is 17 nucleobases or nucleosides in length. In some embodiments, the nucleic acid sequence is 20 nucleobases or nucleosides in length.

[0018] In some embodiments, the nucleic acid sequence comprises, consists essentially of, or consists of GAGGTCAGAGGGAAAGG (SEQ ID NO: 3998).

[0019] In some embodiments, the synthetic oligonucleotide comprises, consists essentially of, or consists of /CholTEG//iSp18//iSp18/lG*lA*lG*G*T*/iMe-dC/*A*G*A*G*/7deazaG/*G*A*AlA*lG*lG (SEQ ID NO: 7616), wherein lA, lG, A, T, G, iMe-dC, 7deazaG, *, iSp18 and CholTEG are defined as in Table 24.

[0020] In some embodiments, the nucleic acid sequence comprises, consists essentially of, or consists of CAGACCCTGAGTCCAGGAGA (SEQ ID NO: 1312).

[0021] In some embodiments, the synthetic oligonucleotide comprises, consists essentially of, or consists of /5-Me-lC/*lA*lG*A*/iMe-dC/*/iMe-dC/*/iMe-dC/*T*G*A*G*T*/iMe-dC/*/iMe-dC/*A*G*G*lA*lG*lA/iSp18//iSp18//3CholTEG/ (SEQ ID NO: 7834), wherein 5-Me-lC, lA, lC, A, T, G, iMe-dC, *, iSp18 and 3CholTEG are defined as in Table 24.

[0022] In some embodiments, the nucleic acid sequence comprises, consists essentially of, or consists of GAGACGCAACCCCCGCCCTG (SEQ ID NO: 3118).

[0023] In some embodiments, the synthetic oligonucleotide comprises, consists essentially of, or consists of lG*lA*lG*A*/iMe-dC/*/iMe-dCl*A*A*/iMe-dC/*/iMe-dC/*/iMe-dC/*/iMe-dC/*/iMe-dCl*G*/iMe-dC/G*/iMe-dC/*/5-Me-lC/*lT*lG/iSp18//iSp18//3CholTEG/ (SEQ ID NO: 7836), wherein 5-Me-lC lA, lG, lT, A, G, iMe-dC, *, iSp18, and 3CholTEG are defined as in Table 24.

[0024] According to some aspects, a pharmaceutical composition comprising a synthetic oligonucleotide disclosed herein, or a pharmaceutically acceptable salt thereof, is contemplated herein.

[0025] According to some aspects, a spherical nucleic acid (SNA) is contemplated herein. In some embodiments, the SNA comprises a core and an oligonucleotide shell, wherein the oligonucleotide shell comprises a first synthetic oligonucleotide comprising a first nucleic acid sequence complementary to or sufficiently complementary to a region of a first kallikrein-related peptidase (KLK) gene that is a KLK5 gene and/or to a region of a first KLK gene product that is a KLK5 gene product, and a second synthetic oligonucleotide comprising a second nucleic acid sequence complementary to or sufficiently complementary to a region of a second KLK gene that is a KLK7 gene and/or to a region of a second KLK gene product that is a KLK gene product.

[0026] In some embodiments, the region of the first KLK gene and/or the region of the first KLK gene product is within exon 6 of a KLK5 gene or a KLK5 gene product.

[0027] In some embodiments, the region of the second. KLK gene and/or the region of the second KLK gene product is within exon 5 of a KLK7 gene or a KLK7 gene product.

[0028] In some embodiments, the region of the first KLK gene and/or the region of the first KLK gene product is within exon 6 of a KLK5 gene or a KLK5 gene product and the region of the second KLK gene and/or the region of the second KLK gene product is within exon 5 of a KLK7 gene or a KLK7 gene product.

[0029] In some embodiments, the first synthetic oligonucleotide is a synthetic oligonucleotide disclosed herein and the second synthetic oligonucleotide is a synthetic oligonucleotide disclosed herein.

[0030] In some embodiments, the first synthetic oligonucleotide or nucleic acid sequence is indirectly attached to a first molecular species and the second synthetic oligonucleotide or nucleic acid sequence is indirectly attached to a second molecular species.

[0031] In some embodiments, the first molecular species is indirectly attached to one end of the first synthetic oligonucleotide or nucleic acid sequence and the second molecular species is indirectly attached to one end of the second synthetic oligonucleotide or nucleic acid sequence. In some embodiments, the first molecular species is indirectly attached to the 3′-end of the first synthetic oligonucleotide or nucleic acid sequence and the second molecular species is indirectly attached to the 5′-end of the second synthetic oligonucleotide or nucleic acid sequence.

[0032] In some embodiments, the first synthetic oligonucleotide is anchored to the surface of the core through the first molecular species and the second synthetic oligonucleotide is anchored to the surface of the core through the second molecular species.

[0033] In some embodiments, the oligonucleotide shell comprises a plurality of the first synthetic oligonucleotides to form a first population of synthetic oligonucleotides and a plurality of the second synthetic oligonucleotides to form a second population of synthetic oligonucleotides, wherein each of the first synthetic oligonucleotides is anchored to the surface of the core through the first molecular species and each of the second synthetic oligonucleotides is anchored to the surface of the core through the second molecular species.

[0034] In some embodiments, the first nucleic acid sequence comprises, consists essentially of, or consists of CAGACCCTGAGTCCAGGAGA (SEQ ID NO: 1312), and the second nucleic acid sequence comprises, consists essentially of, or consists of GAGGTCAGAGGGANAGG (SEQ ID NO: 3998).

[0035] In some embodiments, the first synthetic oligonucleotide comprises, consists essentially of, or consists of /5-Me-lC/*lA*lG*A*/iMe-dC/*/iMe-dC/*/iMe-dC/*T*G*A*G*T*/iMe-dC/*/iMe-dC/*A*G*G*lA*lG*lA/iSp18//iSp18//3Chol (SEQ ID NO: 7834), and the second synthetic oligonucleotide comprises, consists essentially of, or consists of /CholTEG//iSp18//iSp18/lG*lA*lG*G*T*/iMe-dC/*A*G*A*G*/7deazaG/*G*A*A*lA*lG*lG (SEQ ID NO: 7616), wherein 5-Me-lC, lA, lG, A, T, G, iMe-dC, 7deazaG, *, iSp18, CholTEG and 3CholTEG are defined as in Table 24.

[0036] In some embodiments, the first synthetic oligonucleotide comprises, consists essentially of, or consists of a synthetic oligonucleotide disclosed herein and the second synthetic oligonucleotide comprises, consists essentially of, or consists of a synthetic oligonucleotide disclosed herein.

[0037] In some embodiments, the first nucleic acid sequence comprises, consists essentially of, or consists of GAGACGCAACCCCCGCCCTG (SEQ ID NO: 3118), and the second nucleic acid sequence comprises, consists essentially of, or consists of GAGGTCAGAGGGAAAGG (SEQ ID NO: 3998).

[0038] In some embodiments, the first synthetic oligonucleotide comprises, consists essentially of, or consists of lG*lA*lG*A*/iMe-dC/*G*/iMe-dC/*A*A*/iMe-dC/*/iMe-dC/*/iMe-dC/*/iMe-dC/*/iMe-dC/*G*/iMe-dC/*/iMe-dC/*/5-Me-lC/*lT*lG/iSp18//iSp18//3CholTEG/ (SEQ ID NO: 7836), and the second synthetic oligonucleotide comprises, consists essentially of, or consists of /CholTEG//iSp18//iSp18/lG*lA*lG*G*T*/iMe-dC/*A*G*A*G*/7deazaG/*G*A*A*lA*lG*lG (SEQ ID NO: 7616) wherein lG, lA, lT, 5-Me-lC, A, G, T, 7deazaG, *, iSp18, CholTEG and 3CholTEG are defined as in Table 24.

[0039] In some embodiments, the first synthetic oligonucleotide comprises, consists essentially of, or consists of the synthetic oligonucleotide disclosed herein and the second synthetic oligonucleotide comprises, consists essentially of, or consists of the synthetic oligonucleotide disclosed herein.

[0040] In some embodiments, the core is a hollow core or solid core. In some embodiments, the hollow core is a liposome core.

[0041] In some embodiments, the oligonucleotide shell comprises, consists essentially of, or consists of 20 to 50 total first synthetic oligonucleotides and second synthetic oligonucleotides. In some embodiments, the oligonucleotide shell comprises, consists essentially of, or consists of 25 to 35 total first synthetic oligonucleotides and synthetic oligonucleotides. In some embodiments, the oligonucleotide shell comprises, consists essentially of, or consists of or about 30 total first synthetic oligonucleotides and second synthetic oligonucleotides. In some embodiments, the oligonucleotide shell comprises, consists essentially of, or consists of or about 15 first synthetic oligonucleotides and of or about 15 second synthetic oligonucleotides.

[0042] In some embodiments, the core is a liposome core comprising or consisting of lipid molecules, and wherein the first population of synthetic oligonucleotides and the second population of synthetic oligonucleotides are at a molar ratio of or about 50 to 1 of lipid molecules to the first population of synthetic oligonucleotides and the second population of synthetic oligonucleotides. In some embodiments, the core is a liposome core comprising lipid molecules, and wherein the first population of synthetic oligonucleotides and the second population of synthetic oligonucleotides are at a molar ratio of or about 50 to 0.5 to 0.5 of lipid molecules to the first population of synthetic oligonucleotides to the second population of synthetic oligonucleotides.

[0043] According to some aspects a pharmaceutical composition comprising an SNA disclosed herein, or a pharmaceutically acceptable salt thereof, is contemplated herein.

[0044] According to some aspects, methods of decreasing KLK mRNA levels in a cell are contemplated herein. In some embodiments, the method comprises contacting a cell comprising a KLK gene and/or a KLK gene product with a synthetic oligonucleotide disclosed herein, an SNA disclosed herein, or a pharmaceutical composition disclosed herein, to decrease KLK mRNA levels in the cell relative to a reference level.

[0045] In some embodiments, the KLK mRNA levels are KLK5 mRNA levels, KLK7 mRNA levels, or both KLK5 mRNA levels and KLK7 mRNA levels.

[0046] In some embodiments, the cell comprises a KLK5 gene, a KLK7 gene, or a KLK5 gene and a KLK7 gene.

[0047] In some embodiments, the decreased KLK5 mRNA levels, KLK7 mRNA levels, or KLK5 mRNA levels and KLK7 mRNA levels result in decreased KLK5 protein levels, KLK7 protein levels, or both KLK5 protein levels and KLK7 protein levels in the cell relative to a reference level.

[0048] In some embodiments, the cell is a skin cell. In some embodiments, the cell is at least one of an epithelial cell, a dermal cell, a keratinocyte, an immune cell, a basal cell, an inner root sheath cell, an external root sheath cell, a sebaceous gland cell, and a sweat gland cell. In some embodiments, the cell is a keratinocyte.

[0049] According to some aspects, methods of treating a disease or disorder in a subject are contemplated herein. In some embodiments, the method of treating a disease or disorder in a subject comprises administering to a subject in order to treat the disease or disorder in the subject an effective amount of a synthetic oligonucleotide disclosed herein, an SNA disclosed herein, or a pharmaceutical composition disclosed herein.

[0050] In some embodiments, the disease or disorder is an ichthyosis disease or disorder.

[0051] In some embodiments, the subject has mutations in two serine peptidase inhibitor, Kazal type 5 (SPINK5) alleles.

[0052] In some embodiments, the disease or disorder is a chronic skin disease or disorder.

[0053] In some embodiments, the disease or disorder is Netherton syndrome (NS) or atopic dermatitis. In some embodiments, the disease or disorder is NS.

[0054] In some embodiments, the decrease in KLK5 mRNA levels, KLK7 mRNA levels, or in both KLK5 mRNA levels and KLK7 mRNA levels and/or the decrease in KLK5 protein levels, KLK7 protein levels, or both KLK5 protein levels and KLK7 protein levels in the subject is relative to a reference level.

[0055] In some embodiments, the KLK5 and/or KLK7 mRNA and/or protein levels are decreased in one or more cells in the subject, wherein the one or more cells in the subject are at least one of a skin cell, an epithelial cell, a dermal cell, a keratinocyte, an immune cell, a basal cell, an inner root sheath cell, an external root sheath cell, a sebaceous gland cell, and a sweat gland cell. In some embodiments, the KLK5 and/or KLK7 mRNA and/or protein levels are decreased in a keratinocyte.

[0056] In some embodiments, the synthetic oligonucleotide disclosed herein, the SNA disclosed herein, or the pharmaceutical composition disclosed herein ameliorate or eliminate one or more symptoms or conditions associated with the disease or disorder in the subject, and wherein the symptom or condition is at least one of erythroderma, xeroderma, desquamation, pruritus, skin infections, septicemia, inflammation, ichthyosis linearis circumflexa, bamboo hair, eczema, asthma, allergies, hypernatremia, and dehydration.

[0057] In some embodiments, the method further comprises the administration of a second therapeutic agent.

[0058] Each of the limitations of the invention can encompass various embodiments of the invention. It is, therefore, anticipated that each of the limitations of the invention involving any one element or combinations of elements can be included in each aspect of the invention. This invention is not limited in its application to the details of construction and the arrangement of components set forth in the following description or illustrated in the drawings. The invention is capable of other embodiments and of being practiced or of being carried out in various ways.

### DETAILED DESCRIPTION

[0059] Chronic skin diseases affect large portion of the world population. It is estimated that approximately 60% of the worldwide population has some sort of a dermatological disorder, with 25% of this number requiring medical attention (Eissa, et al. Biol Chem (2008) 389:669-80). Many research efforts have been made to better understand the complexity in different signaling pathways that manifest into different chronic skin diseases, as well as to develop innovative drug delivery systems that can allow the drug to penetrate through the protective outer skin to be localized in the epidermis layer.

[0060] Human tissue kallikreins (KLKs) are secreted serine protease endopeptidases, and the KLK enzymes are co-localized in the upper stratum granulosum and stratum corneum of human epidermis and in associated appendages such as hair follicle epithelia and sweat glands (Eissa, et al. Biol Chem (2008) 389:669-80). Several KLKs are crucially involved in the regulation of skin desquamation and inflammation. Abnormal activation of these KLKs occurs in several skin diseases such as Netherton Syndrome (NS), atopic dermatitis (AD), rosacea and psoriasis (Eissa, et al. Biol Chem (2008) 389:669-80; Nauroy, et al. Matrix Biology Plus (2020) 6-7:100019; Chen, et al. International Journal of Dermatology and Venereology (2019) 2:3).

[0061] More specifically, KLK5 and KLK7 play a key role in degrading desmosomal proteins that are responsible for the structural integrity of the epidermis, of which such degradation of desmosomes is necessary for the shedding of old cells from the skin surface and maintenance of a healthy epidermis, a process known as desquamation (Chen, et al. International Journal of Dermatology and Venereology (2019) 2:3; Simon, et al. J Biol Chem (2001) 276:20292-9; Caubet, et al. J Invest Dermatol (2004) 122:1235-44). For example, the regulation of KLK5 and KLK7 completely rescues the epidermal barrier and the postnatal lethality in NS mice allowing them to reach adulthood with fully functional skin and normal hair growth (Kasparek et al., PLOS Genetics (2017) 13(1l):e1006566). The overactivity of KLK5 was previously found to be responsible for the exacerbation of rosacea and dermatoses such as pruritus and atopic dermatitis (Matsubara, et al. Molecules (2017) 22:1829).

[0062] NS is a rare genetic disorder, inherited in an autosomal recessive pattern, which affects the skin, hair and immune system. NS causes a variety of symptoms, including red scaly skin, outbreaks of circular scaly rashes, bamboo hair (thin, fragile hair), and excessive immune reactions such as hay fever, asthma, itchy skin, and eczema. Dehydration and frequent infections resulting from insufficiency of the skin barrier are common and can be serious or life-threatening. Patients with NS are predisposed to a variety of infections, including viral (e.g., herpes simplex virus, human papilloma virus, etc.) and bacterial infections. Infections associated with NS often lead to septicemia, which can be life-threatening.

[0063] Diagnosis of NS is based on clinical examination, symptoms, and genetic testing.

[0064] Treatment options, among others, include symptom management, such as topical treatment with mild moisturizers, skin barrier repair formulas including ceramides or cholesterol, and low potency forms of topical steroids. While systemic immunomodulatory medications have been tested, their use is typically avoided as these medications often have limited benefits and are associated with severe side-effects.

[0065] NS is a rare hereditary disorder caused by autosomal recessive mutations in serine protease inhibitor of Kazal type 5 (SPINK5). It occurs when two mutated alleles of SPINK5 are inherited. SPINK5 encodes lympho-epithelial Kazal-type-related inhibitor (LEKTI), an inhibitor of protease activity. LEKTI inhibits kallikrein-related peptidases (KLKs), including KLK5, KLK7 and KLK14, particularly within the skin. These three proteases possibly regulate cell shedding (desquamation), given their ability to degrade proteins which form the extracellular component of cell junctions in the stratum corneum. There are approximately 150 cases reported in the medical literature, but the true number of affected individuals may be much higher due to diagnostic difficulties and overlapping symptoms with common AD and other congenital ichthyoses.

[0066] Without wishing to be bound by theory, the symptoms of NS are thought to be caused at least in part by excessive desquamation resulting from dysregulated protease activity in the skin, in particular the protease activity of KLKs. KLK5 may regulate much of this activity, as it is able to self-activate, and also is capable of activating KLK7 and KLK14. Dysregulated KLK5 and/or KLK7 serine protease activity leads to premature detachment of the stratum corneum, the outer skin layer. Loss of stratum corneum can be life-threatening to neonates due to systemic sepsis or severe dehydration due to the compromised epithelial barrier, and it can lead to chronic problems for patients, including allergy, infection, and inflammation.

[0067] Spherical nucleic acids (SNAs) are nanoparticle structures that were originally developed with oligonucleotides specifically designed to regulate specific nucleic acid interactions (Mirkin, et al. Nature (1996) 382:607-9). The use of SNAs show many benefits including, but not limited to, rapid cellular uptake, endosomal delivery, and multivalent binding (Radovic-Moreno, et al. PNAS (2015) 112(13):3892-7). Topically applied SNA have shown promising results in reducing gene expression and subsequently T-cell production that could otherwise manifest to psoriasis, a skin disease with autoimmune nature (Nemati, et al. J Control Release (2017) 268:259-68).

[0068] Disclosed herein are compositions, such as oligonucleotides (e.g., synthetic oligonucleotides), spherical nucleic acids (SNAs), and methods for decreasing expression of kallikrein-related peptidase (KLK) genes (e.g., KLK5 and KLK7). As disclosed herein, it has been discovered that oligonucleotides (e.g., synthetic oligonucleotides), SNAs, and compositions decrease KLK gene expression and/or KLK protein to levels that promote either partially or completely one or more beneficial phenotype(s) for the treatment, amelioration and/or elimination of one or more, or all, characteristics, conditions, and/or symptoms associated with skin diseases (e.g., chronic skin disease) that can be treated by decreasing KLK5 expression, KLK7 expression or both KLK5 and KLK7 expression.

[0069] In some embodiments, the skin disease is an inflammatory skin disease. In some embodiments, the skin disease is a chronic inflammatory skin disease. In some embodiments, the skin disease is an acute inflammatory skin disease. In some embodiments, the inflammatory skin disease causes tissue damage. In some embodiments, the skin disease is associated with inflammation or inflammatory response driven by an immune cell. In some embodiments, the skin disease is eczema. In some embodiments, the skin disease is AD. In some embodiments, the skin disease is rosacea. In some embodiments, the skin disease is psoriasis. In some embodiments, the skin disease is seborrheic dermatitis. In some embodiments, the skin disease is allergic contact dermatitis. In some embodiments, the skin disease is NS.

[0070] In some embodiments, oligonucleotides (e.g., synthetic oligonucleotides) disclosed herein comprise nucleosides having modifications, such as a methyl modification. In some embodiments, the modification is a 2′-O-methyl modification.

[0071] A 2′-O-methyl modification, or 2′-O-methylation, terms which are used interchangeably to refer to a nucleoside modification in which a methyl group is added to the 2′ hydroxyl of the ribose moiety of a nucleoside, producing a methoxy group. Any nucleobase or nucleoside can be modified by 2′-O-methylation. These modifications can influence various properties of oligonucleotides, including structure, stability, and interactions with other molecules.

[0072] In some embodiments, an oligonucleotide (e.g., synthetic oligonucleotide) disclosed herein comprises a nucleoside with a modification, such as a 2′-O-methyl-modification. In some embodiments, an oligonucleotide (e.g., synthetic oligonucleotide) comprises two or at least two nucleosides each comprising a 2′-O-methyl modification. In some embodiments, an oligonucleotide (e.g., a synthetic oligonucleotide) disclosed herein comprises three or at least three, four or at least four, five or at least five, six or at least six, seven or at least seven, eight or at least eight, nine or at least nine, 10 or at least 10, 11 or at least 11, 12 or at least 12, 13 or at least 13, 14 or at least 14, 15 or at least 15, 16 or at least 16, 17 or at least 17, 18 or at least 18, 19 or at least 19, 20 or at least 20 or more nucleosides each comprising a 2′-O-methyl modification.

[0073] In some embodiments, the nucleosides are consecutive nucleosides comprising two or at least two, three or at least three, four or at least four, five or at least five, six or at least six, seven or at least seven, eight or at least eight, nine or at least nine, 10 or at least 10, 11 or at least 11, 12 or at least 12, 13 or at least 13, 14 or at least 14, 15 or at least 15, 16 or at least 16, 17 or at least 17, 18 or at least 18, 19 or at least 19, 20 or at least 20 or more consecutive nucleosides each comprising a 2′-O-methyl modification. In some embodiments, the nucleosides are not consecutive.

[0074] In some embodiments, an oligonucleotide (e.g., a synthetic oligonucleotide) disclosed herein comprises five consecutive nucleosides each comprising a 2′-O-methyl modification. In some embodiments, an oligonucleotide (e.g., a synthetic oligonucleotide) disclosed herein comprises 20 consecutive nucleosides each comprising a 2′-O-methyl modification. In some embodiments, an oligonucleotide (e.g., a synthetic oligonucleotide) disclosed herein comprises ten nucleosides, either consecutive or discontinuous, each comprising a 2′-O-methyl modification. In some embodiments, an oligonucleotide (e.g., a synthetic oligonucleotide) disclosed herein comprises ten nucleosides comprising 2′-O-methyl modifications.

[0075] In some embodiments, oligonucleotides (e.g., synthetic oligonucleotides), SNAs, and compositions target nucleic acid segments (e.g., regions) in a KLK gene (e.g., a KLK5 gene and/or a KLK7 gene) and/or a KLK gene product (e.g., a KLK5 gene product and/or a KLK7 gene product), which are transcribed into mRNA (e.g., exons transcribed into KLK5 mRNA and/or exons transcribed into KLK7 mRNA).

[0076] In some embodiments, oligonucleotides (e.g., synthetic oligonucleotides), SNAs, and compositions target nucleic acid segments (e.g., regions) in a KLK gene (e.g., a KLK5 gene and/or a KLK7 gene) and/or a KLK gene product (e.g., a KLK5 gene product and/or a KLK7 gene product), which are not transcribed into mRNA (e.g., introns, 5′-untranslated regions or 5′-UTRs, 3′-untranslated regions or 3′-UTRs, etc.).

[0077] In some embodiments, an SNA disclosed herein comprises a first synthetic oligonucleotide comprising a nucleic acid sequence complementary or sufficiently complementary to a region of a first KLK gene and/or to a region of a first KLK gene product, and a second synthetic oligonucleotide comprising a nucleic acid sequence complementary or sufficiently complementary to a region of a second KLK gene and/or to a region of a second KLK gene product. In some embodiments, the first KLK gene is a KLK5 gene. In some embodiments, the first KLK gene product is a KLK5 gene product. In some embodiments, the second KLK gene is a KLK7 gene. In some embodiments, the second KLK gene product is a KLK7 gene product. In some embodiments, the first synthetic oligonucleotide comprises a nucleic sequence complementary or sufficiently complementary to two or more different or non-overlapping regions in a first KLK gene.

[0078] In some embodiments, the first synthetic oligonucleotide and the second synthetic oligonucleotide each include nucleic acid sequences which are each complementary or sufficiently complementary to different or non-overlapping regions (e.g., a first region, a second region, a third region, a fourth region, a fifth region, etc.) in the first KLK gene and/or first KLK gene product. In some embodiments, the first KLK gene is a KLK5 gene and both the first synthetic oligonucleotide and the second synthetic oligonucleotide each include nucleic acid sequences which are each complementary or sufficiently complementary to different or non-overlapping regions (e.g., a first region, a second region, a third region, a fourth region, a fifth region, etc.) in a KLK5 gene and/or KLK5 gene product. In some embodiments, the first KLK gene is a KLK7 gene and both the first synthetic oligonucleotide and the second synthetic oligonucleotide each include nucleic acid sequences which are each complementary or sufficiently complementary to different or non-overlapping regions (e.g., a first region, a second region, a third region, a fourth region, a fifth region, etc.) in a KLK7 gene and/or KLK7 gene product.

[0079] In some embodiments, the first KLK gene and/or first KLK gene product and the second KLK gene and/or second KLK gene product are the same, such that both the first synthetic oligonucleotide and the second synthetic oligonucleotide each include nucleic acid sequences which are each complementary or sufficiently complementary to different or non-overlapping regions (e.g., a first region, a second region, a third region, a fourth region, a fifth region, etc.) in the same KLK gene and/or KLK gene product. In some embodiments, the first KLK gene and/or first KLK gene product and the second KLK gene and/or second KLK gene product are a KLK5 gene and/or KLK5 gene product. In some embodiments, the first KLK gene and/or first KLK gene product and the second KLK gene and/or second KLK gene product are a KLK7 gene and/or KLK7 gene product.

[0080] In some embodiments, the first KLK gene and/or first KLK gene product and the second KLK gene and/or second KLK gene product are different, such that the first synthetic oligonucleotide in a SNA disclosed herein includes a nucleic acid sequence which is complementary or sufficiently complementary to a region in a first KLK gene and/or first KLK gene product and the second synthetic oligonucleotide includes a nucleic acid sequence which is complementary or sufficiently complementary to a region in a second KLK gene and/or second KLK gene product. In some embodiments, the first KLK gene and/or first KLK gene product is a KLK5 gene and/or KLK5 gene product and the second KLK gene and/or second KLK gene product is a KLK7 gene and/or KLK7 gene product. In some embodiments, the SNA comprising the first synthetic oligonucleotide and the second synthetic oligonucleotide decrease expression of a KLK gene product (KLK5 mRNA, KLK7 mRNA, etc.). In some embodiments, the SNA comprising the first synthetic oligonucleotide and the second synthetic oligonucleotide decrease KLK protein levels (KLK5 protein, KLK7 protein, etc.).

[0081] In some embodiments, an SNA disclosed herein comprises a synthetic oligonucleotide comprising a nucleic acid sequence complementary or sufficiently complementary to a region of a first KLK gene and/or to a region of a first KLK gene product, and a second synthetic oligonucleotide comprising a nucleic acid sequence complementary or sufficiently complementary to a region of a second KLK gene and/or to a region of a second KLK gene product. In some embodiments, the first KLK gene is a KLK5 gene. In some embodiments, the first KLK gene product is a KLK5 gene product. In some embodiments, the second KLK gene is a KLK7 gene. In some embodiments, the second KLK gene product is a KLK7 gene product. In some embodiments, the first synthetic oligonucleotide comprises a nucleic sequence complementary or sufficiently complementary to two or more different or non-overlapping regions in a first KLK gene.

[0082] In some embodiments, a composition comprising two or more SNAs is contemplated herein in which a first SNA disclosed herein comprises a first synthetic oligonucleotide comprising a nucleic acid sequence complementary or sufficiently complementary to a region of a first KLK gene and/or to a region of a first KLK gene product; and a second SNA disclosed herein comprises a second synthetic oligonucleotide comprising a nucleic acid sequence complementary or sufficiently complementary to a region of a second KLK gene and/or to a region of a first KLK gene product. In some embodiments, the composition decreases expression of two or more KLK mRNAs (e.g., KLK5 mRNA and KLK7 mRNA) and/or decrease levels of two or more distinct KLK proteins (e.g., KLK5 protein and KLK7 protein).

[0083] In some embodiments, a composition comprising two or more SNAs is contemplated herein in which a first SNA disclosed herein comprises a first synthetic oligonucleotide comprising a nucleic acid sequence complementary or sufficiently complementary to a first region of a KLK gene and/or a KLK gene product; and a second SNA disclosed herein comprises a second synthetic oligonucleotide comprising a nucleic acid sequence complementary or sufficiently complementary to a second region of the KLK gene and/or KLK gene product. In some embodiments, the KLK gene and/or KLK gene product is KLK5 and/or a KLK5 gene product and the composition decreases expression of a KLK5 mRNA and/or decrease levels of KLK5 protein. In some embodiments, the KLK gene and/or KLK gene product is KLK7 and/or a KLK7 gene product and the composition decreases expression of a KLK7 mRNA and/or decrease levels of KLK7 protein.

[0084] In some embodiments, a synthetic oligonucleotide disclosed herein comprises a nucleic acid sequence complementary to a region within an exon of a KLK gene (e.g., a KLK5 gene or a KLK7 gene) and/or a KLK gene product (e.g., a KLK5 gene product or a KLK7 gene product). In some embodiments, a synthetic oligonucleotide disclosed herein comprises a nucleic acid sequence complementary to or sufficiently complementary to a region within an intron of a KLK gene (e.g., a KLK5 gene or a KLK7 gene) and/or a KLK gene product (e.g., a KLK5 gene product or a KLK7 gene product). In some embodiments, a synthetic oligonucleotide disclosed herein comprises a nucleic acid sequence complementary to or sufficiently complementary to a region within a 3′-untranslated (3′-UTR) region or a 5′-untranslated region (5′-UTR) of a KLK gene (e.g., a KLK5 gene or a KLK7 gene) and/or a KLK gene product (e.g., a KLK5 gene product or a KLK7 gene product).

[0085] In some embodiments, a synthetic oligonucleotide, an SNA, or a composition thereof inhibits expression of a KLK gene (e.g., KLK5 or KLK7) by decreasing the stability of a KLK mRNA molecule (e.g., a KLK5 mRNA molecule or a KLK7 mRNA molecule). In some embodiments, a synthetic oligonucleotide, an SNA, or a composition thereof inhibits expression of a KLK gene (e.g., KLK5 or KLK7) by decreasing ribosome binding to a KLK mRNA molecule (e.g., a KLK5 mRNA molecule or a KLK7 mRNA molecule). In some embodiments, a synthetic oligonucleotide, an SNA, or a composition thereof inhibits expression of a KLK gene (e.g., KLK5 or KLK7) by decreasing the processivity of ribosomes along a KLK mRNA molecule (e.g., a KLK5 mRNA molecule or a KLK7 mRNA molecule). In some embodiments, a synthetic oligonucleotide, an SNA, or a composition thereof inhibits expression of a KLK gene (e.g., KLK5 or KLK7) by decreasing the transcription of a KLK mRNA molecule (e.g., a KLK5 mRNA molecule or a KLK7 mRNA molecule) from a KLK gene. In some embodiments, a synthetic oligonucleotide, an SNA, or a composition thereof inhibits expression of a KLK gene (e.g., KLK5 or KLK7) by interfering with splicing of a KLK pre-mRNA molecule (e.g., a KLK5 pre-mRNA molecule or a KLK7 pre-mRNA molecule). In some embodiments, a synthetic oligonucleotide, an SNA, or a composition thereof inhibits expression of a KLK gene (e.g., KLK5 or KLK7) by activating nonsense-mediated decay of a KLK mRNA or pre-mRNA molecule (e.g., a KLK5 pre-mRNA molecule or a KLK7 pre-mRNA molecule). In some embodiments, a synthetic oligonucleotide, an SNA, or a composition thereof inhibits expression of a KLK gene (e.g., KLK5 or KLK7) by activating RNase H degradation of a KLK mRNA or pre-mRNA molecule (e.g., a KLK5 pre-mRNA molecule or a KLK7 pre-mRNA molecule). In some embodiments, a synthetic oligonucleotide, an SNA, or a composition thereof inhibits expression of a KLK gene (e.g., KLK5 or KLK7) by both altering splicing of a pre-mRNA molecule (e.g., a KLK5 pre-mRNA molecule or a KLK7 pre-mRNA molecule) and by decreasing the stability of a KLK mRNA and/or pre-mRNA molecule (e.g., a KLK5 mRNA and/or pre-mRNA molecule or a KLK7 mRNA and/or pre-mRNA molecule).

[0086] In some embodiments, an “oligonucleotide” refers to a nucleic acid sequence with nucleotides (e.g., molecules comprising a sugar, such as ribose or deoxyribose) linked to a phosphate or other suitable chemical group and to an exchangeable base. In some embodiments, the base is an organic base. In some embodiments the base is a pyrimidine (e.g., cytosine (C), thymine (T) or uracil (U)) or a purine (e.g., adenine (A) or guanine (G))). In some embodiments, the oligonucleotide is between eight and 100 nucleobases or nucleosides in length.

[0087] In some embodiments, the oligonucleotide is a synthetic oligonucleotide. As disclosed herein, a “synthetic oligonucleotide” refers to a non-naturally occurring oligonucleotide. A synthetic oligonucleotide, in some embodiments, refers to a synthetic DNA or synthetic RNA. In some embodiments, a synthetic oligonucleotide is produced through an in vitro transcription reaction (e.g., artificial (non-natural) chemical synthesis, solid phase nucleic acid synthesis or through another method known by one of ordinary skill in the art). In some embodiments, a synthetic oligonucleotide includes a modification at one or both ends of the nucleic acid sequence in the synthetic oligonucleotide. In some embodiments, the synthetic oligonucleotide is produced by nucleic acid synthesis (e.g., in vitro), chemical nucleic acid synthesis, and/or solid phase nucleic acid synthesis, or produced through other methods well known in the art. In some embodiments, one or more bases in the oligonucleotide (e.g., synthetic oligonucleotide) or nucleic acid sequence include a modification.

[0088] In some embodiments, an oligonucleotide (e.g., a synthetic oligonucleotide) disclosed herein comprises a nucleic acid sequence that is 8, 9, 10, 11, 12, 13, 14, 15, 16, 17, 18, 19, 20, 21, 22, 23, 24, 25, 26, 27, 28, 29, 30, 31, 32, 33, 34, 35, 36, 37, 38, 39, 40, 41, 42, 43, 44, 45, 46, 47, 48, 49, 50, 51, 52, 53, 54, 55, 56, 57, 58, 59, 60, 61, 62, 63, 64, 65, 66, 67, 68, 69, 70, 71, 72, 73, 74, 75, 76, 77, 78, 79, 80, 81, 82, 83, 84, 85, 86, 87, 88, 89, 90, 91, 92, 93, 94, 95, 96, 97, 98, 99, or 100 nucleobases or nucleosides in length, or any range or combination thereof. In some embodiments, the nucleic acid sequence of the synthetic oligonucleotide is 10 to 30, 10 to 35, 10 to 40, 10 to 45, 10 to 50, 10 to 60, 10 to 70, 10 to 80, 10 to 90, 10 to 100 or more than 100 nucleobases or nucleosides in length. In some embodiments, an oligonucleotide (e.g., a synthetic oligonucleotide) disclosed herein comprising a nucleic acid sequence that is 10 to 30 nucleobases or nucleosides in length. In some embodiments, an oligonucleotide (e.g., a synthetic oligonucleotide) disclosed herein is 15 to 22 nucleobases or nucleosides in length. In some embodiments, the oligonucleotide (e.g., synthetic oligonucleotide) is 20 nucleobases or nucleosides in length. In some embodiments, the oligonucleotide (e.g., synthetic oligonucleotide) is 17 nucleobases or nucleosides in length.

[0089] In some embodiments, the synthetic oligonucleotide comprises, consists essentially of, or consists of a nucleic acid sequence complementary to or sufficiently complementary to a region (e.g. a nucleic acid sequence segment) of at least one of a kallikrein-related peptidase (KLK) gene (e.g., a KLK5 gene and/or a KLK7 gene), a region of a KLK gene (e.g., a region of KLK5 and/or a region of KLK7), a KLK gene product (e.g., a KLK5 gene product and/or a KLK7 gene product), and a region of a KLK gene product (e.g., a region of a KLK5 gene product and/or a region of a KLK7 gene product). In some embodiments, a synthetic oligonucleotide disclosed herein comprises, consists essentially of, or consists of a nucleic acid sequence complementary to or sufficiently complementary to a region (e.g., a nucleic acid sequence segment) of at least one of SEQ ID NO: 7477, SEQ ID NO: 7478, SEQ ID NO: 7575, SEQ ID NO: 7576, SEQ ID NO: 7577, SEQ ID NO: 7578.

[0090] In some embodiments, a nucleic acid sequence of an oligonucleotide (e.g., a synthetic oligonucleotide) is at least or about 45%, at least or about 50%, at least or about 55%, at least or about 60%, at least or about 65%, at least or about 70%, at least or about 75%, at least or about 80%, at least or about 85%, at least or about 90%, at least or about 95%, at least or about 96%, at least or about 97%, at least or about 98%, at least or about 99%, or about 100%, or any range or combination thereof, identical to the nucleic acid sequence of an oligonucleotide (e.g., synthetic oligonucleotide) disclosed herein (e.g., any one of SEQ ID NOs: 1-3302; SEQ ID NOs: 3149-5336; SEQ ID NOs: 5376-5380; SEQ ID NOs: 5414-5418; SEQ ID NOs: 5647-7342; SEQ ID NOs: 7442-7574; SEQ ID NOs: 7579-7803; SEQ ID NOs: 7806-7807; SEQ ID NOs: 7809-7847; and/or an oligonucleotide provided in any one of Tables 1-14).

[0091] In some embodiments, an oligonucleotide (e.g., a synthetic oligonucleotide) is at least or about 45%, at least or about 50%, at least or about 55%, at least or about 60%, at least or about 65%, at least or about 70%, at least or about 75%, at least or about 80%, at least or about 85%, at least or about 90%, at least or about 95%, at least or about 96%, at least or about 97%, at least or about 98%, at least or about 99%, or about 100%, or any range or combination thereof, identical to /5-Me-lC/*lA*lG*A*/iMe-dC/*/iMe-dC/*/iMe-dC/*T*G*A*G*T*/iMe-dC/*/iMe-dC/*A*G*G*lA*lG*lA/iSp18//iSp18//3CholTEG/ (SEQ ID NO: 7834).

[0092] In some embodiments, a nucleic acid sequence of an oligonucleotide (e.g., a synthetic oligonucleotide) is at least or about 45%, at least or about 50%, at least or about 55%, at least or about 60%, at least or about 65%, at least or about 70%, at least or about 75%, at least or about 80%, at least or about 85%, at least or about 90%, at least or about 95%, at least or about 96%, at least or about 97%, at least or about 98%, at least or about 99%, or about 100%, or any range or combination thereof, identical to the nucleic acid sequence of SEQ ID NO: 1312.

[0093] In some embodiments, an oligonucleotide (e.g., a synthetic oligonucleotide) is at least or about 45%, at least or about 50%, at least or about 55%, at least or about 60%, at least or about 65%, at least or about 70%, at least or about 75%, at least or about 80%, at least or about 85%, at least or about 90%, at least or about 95%, at least or about 96%, at least or about 97%, at least or about 98%, at least or about 99%, or about 100%, or any range or combination thereof, identical to /CholTEG//iSp18//iSp18/lG*lA*lG*G*T*/iMe-dC/*A*G*A*G*/7deazaG/*G*A*A*lA*lG*lG (SEQ ID NO: 7616).

[0094] In some embodiments, a nucleic acid sequence of an oligonucleotide (e.g., a synthetic oligonucleotide) is at least or about 45%, at least or about 50%, at least or about 55%, at least or about 60%, at least or about 65%, at least or about 70%, at least or about 75%, at least or about 80%, at least or about 85%, at least or about 90%, at least or about 95%, at least or about 96%, at least or about 97%, at least or about 98%, at least or about 99%, or about 100%, or any range or combination thereof, identical to the nucleic acid sequence of SEQ ID NO: 3998.

[0095] In some embodiments, an oligonucleotide (e.g., a synthetic oligonucleotide) is at least or about 45%, at least or about 50%, at least or about 55%, at least or about 60%, at least or about 65%, at least or about 70%, at least or about 75%, at least or about 80%, at least or about 85%, at least or about 90%, at least or about 95%, at least or about 961%, at least or about 97%, at least or about 98%, at least or about 99%, or about 100%, or any range or combination thereof, identical to lG*lA*lG*A*/iMe-dC/*G*/iMe-dC/*Ad*A*/iMe-dC/*/iMe-dC/*/iMe-dC/*/iMe-dC/*/iMe-dC/*G*/iMe-dC/*/iMe-dC/*/5-Me-lC/*lT*lG/iSp18//iSp18//3CholTEG/ (SEQ ID NO: 7836).

[0096] In some embodiments, a nucleic acid sequence of an oligonucleotide (e.g., a synthetic oligonucleotide) is at least or about 45%, at least or about 50%, at least or about 55%, at least or about 60%, at least or about 65%, at least or about 70%, at least or about 75%, at least or about 80%, at least or about 85%, at least or about 90%, at least or about 95%, at least or about 96%, at least or about 97%, at least or about 98%, at least or about 99%, or about 100%, or any range or combination thereof, identical to the nucleic acid sequence of SEQ ID NO: 3118.

[0097] In some embodiments, an oligonucleotide (e.g., a synthetic oligonucleotide) disclosed herein is any size useful for producing an effect (e.g., promote either partially or completely one or more beneficial phenotype(s) for the treatment, amelioration and/or elimination of one or more characteristics, conditions, and/or symptoms associated with NS, as disclosed herein).

[0098] In some embodiments, the oligonucleotide (e.g., synthetic oligonucleotide) is single-stranded. In some embodiments, the oligonucleotide (e.g., synthetic oligonucleotide) is hybridized to a second oligonucleotide (e.g., synthetic oligonucleotide) and forms a double-stranded oligonucleotide. In some embodiments, the oligonucleotide (e.g., synthetic oligonucleotide) is not hybridized to a second oligonucleotide and does not form a double-stranded oligonucleotide.

[0099] In some embodiments, an oligonucleotide (e.g., a synthetic oligonucleotide) is a single-stranded oligonucleotide.

[0100] In some embodiments, a synthetic oligonucleotide comprises, consists essentially of, or consists of a 5′-wing segment, a 3′-wing segment, and a gap segment.

[0101] In some embodiments, an oligonucleotide (e.g., a synthetic oligonucleotide) has a gap segment.

[0102] As disclosed herein, a “gap segment” corresponds to two or more linked nucleosides in a synthetic oligonucleotide, which are positioned between the 5′-wing segment and the 3′-wing segment. In some embodiments, an oligonucleotide (e.g., a synthetic oligonucleotide) does not have a gap segment. In some embodiments, a gap segment refers to one or more linked nucleosides located at the center or near the center of an oligonucleotide, such as a synthetic oligonucleotide. In some embodiments, the gap segment consists of two to three, two to four, two to five, two to six, two to seven, two to eight, two to nine, two to 10, two to 20, two to 30, two to 40, two to 50, three to four, three to five, three to six, three to seven, three to eight, three to nine, three to 10, three to 20, three to 30, three to 40, three to 50, four to five, four to six, four to seven, four to eight, four to nine, four to 10, four to 20, four to 30, four to 40, four to 50, five to six, five to seven, five to eight, five to nine, five to 10, five to 20, five to 30, five to 40, five to 50, six to seven, six to eight, six to nine, six to 10, six to 20, six to 30, six to 40, six to 50, seven to eight, seven to nine, seven to 10, seven to 20, seven to 30, seven to 40, seven to 50, eight to nine, eight to 10, eight to 20, eight to 30, eight to 40, eight to 50, 10 to 20, 10 to 30, 10 to 40, 10 to 50, 20 to 30, 20 to 40, 20 to 50, 30 to 40, 40 to 50, or 50 linked nucleosides, or any range or combination thereof.

[0103] In some embodiments, the gap segment comprises a nucleoside having a 2′-O-methyl modification. In some embodiments, the gap segment comprises two to 10 nucleosides having 2′-O-methyl modifications. In some embodiments, the gap segment does not comprise a nucleoside having a 2′-O-methyl modification. In some embodiments, the gap segment comprises a phosphorothioate internucleoside linkage. In some embodiments, the gap segment comprises two to 10 phosphorothioate internucleoside linkages. In some embodiments, the gap segment comprises all phosphorothioate internucleoside linkages. In some embodiments, the gap segment does not comprise phosphorothioate internucleoside linkages.

[0104] In some embodiments, the gap segment comprises a phosphodiester internucleoside linkage. In some embodiments, the gap segment comprises two to 10 phosphodiester internucleoside linkages. In some embodiments, the gap segment comprises all phosphodiester internucleoside linkages. In some embodiments, the gap segment does not comprise phosphodiester internucleoside linkages.

[0105] As disclosed herein, a “5′-wing segment” corresponds to two or more linked nucleosides positioned at the 5′-end of a nucleic acid sequence in a synthetic oligonucleotide and corresponding to nucleosides positioned before the first nucleoside at the 5′-end of a gap segment. As disclosed herein, a “3′-wing segment” corresponds to two or more linked nucleosides positioned after the last nucleic acid at the 3′ end of the gap segment and including the last nucleic acid at the 3′ end of the synthetic oligonucleotide. In some embodiments, at least one nucleoside of the 5′-wing segment and/or at least one nucleoside of the 3′-wing segment comprises a modification.

[0106] In some embodiments, the modification is a 2′-O-methyl modification. In some embodiments, the nucleosides in the synthetic oligonucleotide are modified with one or more other modifications disclosed herein. In some embodiments, the internucleoside linkages within the gap segment and the linkages connecting the gap segment to the 3′-wing segment and/or the 5′-wing segment are all phosphorothioate linkages (*). In some embodiments, the internucleoside linkages connecting the rest of the nucleosides of both the 5′ and 3′-wing segments are phosphodiester linkages. In some embodiments, the internucleoside linkages connecting the rest of the nucleosides of both the 5′ and 3′-wing segments are phosphorothioate linkages (*). In some embodiments, all internucleoside linkages connecting the nucleosides of the 5′-wing segment, the gap segment, and the 3′-wing segment are phosphorothioate linkages (*).

[0107] As disclosed herein, in some embodiments, a “nucleic acid” refers to multiple nucleotides (i.e., molecules comprising a sugar (e.g., ribose or deoxyribose) linked to a phosphate group and to an exchangeable organic base, which is either a substituted pyrimidine (e.g., cytosine (C), thymine (T) or uracil (U)) or a substituted purine (e.g., adenine (A) or guanine (G))). As used herein, the term nucleic acid refers to polyribonucleotides as well as polydeoxyribonucleotides. The term nucleic acid shall also include polynucleosides (i.e., a polynucleotide minus the phosphate) and any other organic base containing polymer. Non-limiting examples of nucleic acids include chromosomes, genomic loci, genes or gene segments that encode polynucleotides or polypeptides, coding sequences, non-coding sequences (e.g., intron, 5′-UTR, or 3′-UTR) of a gene, pre-mRNA, mRNA, etc.

[0108] In some embodiments, the nucleic acid sequence and/or oligonucleotide (e.g., a synthetic oligonucleotide) includes a substitution and/or modification. In some embodiments, the substitution and/or modification is in one or more bases and/or sugars. For example, in some embodiments a nucleic acid sequence and/or oligonucleotide (e.g., a synthetic oligonucleotide) includes nucleic acids having backbone sugars that are covalently attached to low molecular weight organic groups other than a hydroxyl group at the 2′ position and other than a phosphate group or hydroxyl group at the 5′ position. Thus, in some embodiments, a substituted or modified nucleic acid sequence and/or oligonucleotide (e.g., a synthetic oligonucleotide) includes a 2′-O-alkylated ribose group. In some embodiments, a modified nucleic acid sequence and/or oligonucleotide (e.g., a synthetic oligonucleotide) includes sugars such as hexose, 2′-F hexose, 2′-amino ribose, constrained ethyl (CEt), locked nucleic acid (LNA, also known as bridged nucleic acid (BNA)), arabinose or 2′-fluoroarabinose instead of ribose. Thus, in some embodiments, a nucleic acid sequence and/or oligonucleotide (e.g., a synthetic oligonucleotide) is heterogeneous in backbone composition thereby containing any possible combination of polymer units linked together such as peptide-nucleic acids (which have an amino acid backbone with nucleic acid bases).

[0109] In some embodiments, the nucleic acid sequence and/or oligonucleotide (e.g., synthetic oligonucleotide) includes one or more 2′-O-methoxyethyl (2′-MOE) modifications or modified nucleosides. In some embodiments, the nucleic acid sequence and/or oligonucleotide (e.g., synthetic oligonucleotide) includes one or more LNA modifications or modified nucleosides. In some embodiments, the nucleic acid sequence and/or oligonucleotide (e.g., synthetic oligonucleotide) includes a 2′-MOE modified nucleoside and an LNA modification or modified nucleoside.

[0110] In some embodiments, a nucleic acid sequence and/or oligonucleotide (e.g., synthetic oligonucleotide) disclosed herein includes at least one LNA modification or modified nucleoside. An LNA modification or modified nucleoside is a modified RNA nucleoside in which the ribose moiety is modified with an additional bond connecting the 2′ oxygen and the 4′ carbon.

[0111] Without wishing to be bound by theory, LNA modifications, such as in LNA modified nucleosides, enhance base stacking and backbone organization, and significantly increase the hybridization properties of oligonucleotides. In some embodiments, the melting temperature of oligonucleotides comprising an LNA modification(s) or modified nucleoside(s) can be increased relative to an unmodified oligonucleotide having the same nucleic acid sequence.

[0112] In some embodiments, the LNA modification or modified nucleoside is, comprises, consists essentially of, or consists of (2′-O, 4′-C methylene)-Adenosine. In some embodiments, the LNA modification or modified nucleoside is, comprises, consists essentially of, or consists of 5-methyl-(2′-O, 4′-C methylene)-Cytidine. In some embodiments, the LNA modification or modified nucleoside is, comprises, consists essentially of, or consists of (2′-O, 4′-C methylene)-Cytidine. In some embodiments, the LNA modification or modified nucleoside is, comprises, consists essentially of, or consists of (2′-O, 4′-C methylene)-Guanosine. In some embodiments, the LNA modification or modified nucleoside is, comprises, consists essentially of, or consists of 5-methyl-(2′-O, 4′-C methylene)-Uridine. In some embodiments, the nucleic acid sequence and/or oligonucleotide (e.g., synthetic oligonucleotide) includes two or more LNA modification or modified nucleosides, each of which, in some embodiments, comprises, consists of, or consists essentially of an LNA modification or modified nucleoside disclosed herein.

[0113] In some embodiments, a nucleic acid sequence and/or oligonucleotide (e.g., a synthetic oligonucleotide) is DNA, RNA, PNA, CEt, LNA, ENA or hybrids including any chemical or natural modification thereof. Chemical and natural modifications are well known in the art. Non-limiting examples of modifications include modifications designed to increase binding to a target strand (i.e., increase their melting temperatures), to assist in identification of the oligonucleotide or an oligonucleotide-target complex, to increase cell penetration, to stabilize against nucleases and other enzymes that degrade or interfere with the structure or activity of the oligonucleotides, to provide a mode of disruption (a terminating event) once sequence-specifically bound to a target, and to improve the pharmacokinetic properties of the oligonucleotide.

[0114] Modifications include, but are not limited to, for example, (a) end modifications, e.g., 5′ end modifications (phosphorylation, dephosphorylation, conjugation, inverted linkages, etc.) and 3′ end modifications (conjugation, DNA nucleotides, inverted linkages, etc.); (b) base modifications, e.g., replacement with modified bases, stabilizing bases, destabilizing bases, bases that base pair with an expanded repertoire of partners, or conjugated bases; (c) sugar modifications (e.g., at the 2′ position or 4′ position) or replacement of the sugar; as well as (d) internucleoside linkage modifications, including modification or replacement of the phosphodiester linkages. An oligonucleotide (e.g., a synthetic oligonucleotide disclosed herein) can comprise one or more of any of these modifications, or a combination thereof.

[0115] In some embodiments, an oligonucleotide (e.g., a synthetic oligonucleotide) disclosed herein comprises at least one modification or modified nucleoside (e.g., 2′-MOE modification or modified nucleoside, an LNA modification or modified nucleoside, or any other modification or modified nucleoside disclosed herein). In some embodiments, the oligonucleotide (e.g., a synthetic oligonucleotide) comprises at least two modifications or modified nucleosides. In some embodiments, the at least two modifications or modified nucleosides comprise an LNA modification or modified nucleoside and a modification or modified nucleoside disclosed herein.

[0116] In some embodiments, the at least two modifications or modified nucleosides comprise a 2′-MOE modification or modified nucleoside and a modification or modified nucleoside disclosed herein. In some embodiments, the at least two modifications or modified nucleosides comprise a 2′-MOE modification or modified nucleoside and an LNA modification or modified nucleoside. In some embodiments, the oligonucleotide (e.g., a synthetic oligonucleotide) comprises two, three, four, five, six, seven, eight, nine, 10, 11, 12, 13, 14, 15, 16, 17, 18, 19, 20 or more than 20 modifications or modified nucleosides (e.g., 2′-MOE modification or modified nucleoside, an LNA modification or modified nucleoside, or any other modification or modified nucleoside disclosed herein).

[0117] In some embodiments, a nucleic acid sequence and/or oligonucleotide (e.g., synthetic oligonucleotide) disclosed herein comprises an end modification. In some embodiments, 5′- and/or 3′-end modifications involve incorporation or addition of non-native or non-natural components to the 5′- and/or 3′-end of a nucleic acid or oligonucleotide (e.g., synthetic oligonucleotide). Such modifications may improve physicochemical properties, stability, resistance to nuclease degradation, etc. End modifications may include the addition of amino modifiers (e.g., 5′-DMS(O)MT-amino modifier C6, 5′-amino modifier C3-TFA, 5′-amino modifier C12, 5′-amino modifier C6-TFA, 5′-amino-dT, 5′-amino modifier-5, and 3′-amino modifier C7-CPG); thiol modifiers (e.g., 5′-thiol-modifier C6 S-S and 3′-thiol-modifier C6 S-S); 3′-glyceryl modification; binding modifiers (e.g., 5′-biotin, biotin-dT, biotin-TEG, 3′-biotin-TEG-CPG, digoxigenin, and 2,4-dinitrophenol-TEG); spacers (e.g., spacer 9, spacer 12, spacer 18, spacer C3, 3′-spacer-C3-CPG); nucleoside/nucleotide analogs (e.g., 3′-deoxynucleoside-CPG, 2′,3′-dideoxycytidine, halogenated bases, 2′-deoxypseudouridine, 5,6-dihydro-dT, 5,6-dihydro-dU, 5-OH-dC, 5-OH-dU, 8-oxo-dA, 8-oxo-dG, thymidine glycol, dUracil, 2′-deoxynebularine, derivative K, derivative P, inosine, 5-nitroindole, 3-nitropyrrole, 2,6-diaminopurine, 5-Me-dC, 2-aminopurine, etheno-dA, N6-Me-dA, 06-Me-dG, 04-Me-dT, dSpacer, 5′-O-MedT, 7-deaza-dA, 7-deaza-dG, 7-deaza-dX, 7-deaza-8-aza-dA, and puromycin), intercalators (e.g., psoralen C2, and psoralen C6); cholesterol moieties (e.g., cholesteryl-TEG and 3′-cholesteryl-TEG-CPG); methyl RNA nucleotides (e.g., 2′-OMe-A, 2′-OMe-C, 2′-OMe-G and 2′-OMe-U); and/or thiophosphates to the 5′-end and/or the 3′-end of a nucleic acid or oligonucleotide.

[0118] In some embodiments, a nucleic acid sequence and/or oligonucleotide (e.g., synthetic oligonucleotide) disclosed herein comprises a base modification. In some embodiments, a base modification involves replacement of a “natural” or “native” nucleobase of a nucleic acid sequence and/or oligonucleotide (e.g., a synthetic oligonucleotide) with a “non-natural” or “non-native” substituent, or involves chemical modification of a native nucleobase. Non-limiting examples of base modifications include methylation, hydroxymethylation, alkylation, methoxyethyl modifications, and substitutions with heterocyclic, stabilizing, destabilizing, promiscuous, or conjugated base moieties. “Natural” nucleobases include the purine bases adenine and guanine, and the pyrimidine bases thymine, cytosine and uracil. “Non-native” or “non-natural” substituents include 5-methyl-cytosine (5-Me-C), 5-hydroxymethyl cytosine, xanthine, hypoxanthine, 2-aminoadenine, 6-methyl and other alkyl derivatives of adenine and guanine, 2-propyl and other alkyl derivatives of adenine and guanine, 2-thiouracil, 2-thiothymine and 2-thiocytosine, 5-halouracil and cytosine, 5-propynyl (—C≡C—CH₃) uracil and cytosine and other alkynyl derivatives of pyrimidine bases, 6-azo uracil, cytosine and thymine, 5-uracil (pseudouracil), 4-thiouracil, 8-halo, 8-amino, 8-thiol, 8-thioalkyl, 8-hydroxyl and other 8-substituted adenines and guanines, 5-halo (e.g., 5-bromo), 5-trifluoromethyl and other 5-substituted uracils and cytosines, 7-methylguanine and 7-methyladenine, 2-F-adenine, 2-amino-adenine, 8-azaguanine and 8-azaadenine, 7-deazaguanine and 7-deazaadenine and 3-deazaguanine and 3-deazaadenine. Base modifications also include replacement of the native purine or pyrimidine base with other heterocycles, such as 7-deaza-adenine, 7-deazaguanosine, 2-aminopyridine and 2-pyridone, 5-substituted pyrimidines, 6-azapyrimidines and N-2, N-6 and 0-6 substituted purines, including 2-aminopropyladenine, 5-propynyluracil and 5-propynylcytosine. Base modifications can improve various oligonucleotide properties, including stability (e.g., nuclease resistance, thermostability, chemical stability, biological stability, etc.), target hybridization, biocompatibility (e.g., reduced hepatotoxicity, nephrotoxicity, immune stimulation, etc.), mismatch discrimination, water solubility, etc.

[0119] In some embodiments, a nucleic acid sequence and/or oligonucleotide (e.g., synthetic oligonucleotide) disclosed herein comprises one or more (e.g., two or more, three or more, etc.) modified nucleosides (e.g., modified nucleosides with a base modification(s) and/or modified nucleosides with a sugar modification(s)). In some embodiments, the modification or modified nucleoside is a 2′-O-methyl (2′-O-Me) modification or 2′-O-Me modified nucleoside, a 2′-O-methoxyethyl (2′-MOE or MOE) modification or 2′-MOE modified nucleoside, a 2′-O-methoxyethoxy-5-methyl (5-Me-MOE) modification or 5-Me-MOE modified nucleoside, an LNA modification or LNA modified nucleoside, a 5-methyl (5-Me or iMe) modification or 5-Me or iMe modified nucleoside (e.g., 5-methylcytidine or 5-methyluridine), a 5-methyl LNA modification or 5-methyl LNA modified nucleoside, a 7-deaza modification or 7-deaza modified nucleoside, or a 7-deaza-2′-O-methyl (7deazaOM) modification or 7deazaOM modified nucleoside.

[0120] In some embodiments, a nucleic acid sequence and/or oligonucleotide (e.g., synthetic oligonucleotide) disclosed herein comprises an LNA modification or LNA modified nucleoside, and a 5-methyl modification or 5-methyl modified nucleoside. In some embodiments, a nucleic acid sequence and/or oligonucleotide (e.g., synthetic oligonucleotide) disclosed herein comprises an LNA modification or LNA modified nucleoside, a 5-methyl modification or 5-methyl modified nucleoside, and a 7-deaza modification or 7-deaza modified nucleoside. In some embodiments, a nucleic acid sequence and/or oligonucleotide (e.g., synthetic oligonucleotide) disclosed herein further comprises one or more modified internucleoside linkages, such as phosphorothioate internucleoside linkage(s). As a non-limiting example, the nucleic acid sequence and/or oligonucleotide (e.g., synthetic oligonucleotide) comprises one or more LNA modified nucleosides, one or more 5-methyl modified nucleosides, one or more 7-deaza modified nucleosides, and one or more phosphorothioate internucleoside linkages.

[0121] In some embodiments, a modified nucleoside is a 2′-O-methyl adenosine (mA), a 2′-O-methyl cytidine (mC), a 2′-O-methyl guanosine (mG), a 2′-O-methyl uridine (mU), a deoxyadenosine (A, dA), a deoxycytidine (C, dC), a deoxyguanosine (G, dG), a deoxythymidine (T, dT), a 2′-O-methoxyethoxy adenosine (moeA, 2′-MOE-A), a 2′-O-methoxyethoxy-5-methyl cytidine (5-Me-MOE-C), a 2′-O-Methoxyethoxy Guanosine (moeG, 2′-MOE-G), a 2′-O-Methoxyethoxy-5-Methyl Uridine (moeT, 2′-MOE-T), an LNA Adenosine (lA), an LNA 5-Methyl Cytidine (5-Me-lC), an LNA Guanosine (lG), an LNA Thymidine (lT), a 5-Methyl deoxy Cytidine (iMe-dC), a 7-Deaza deoxy Guanosine (7deazaG), or a 7-deaza-2′-O-Methyl Guanosine (7deazaOMG).

[0122] In some embodiments, a nucleic acid sequence and/or oligonucleotide (e.g., synthetic oligonucleotide) disclosed herein comprises a sugar modification. In some embodiments, a sugar modification involves replacement of a “natural” or “native” sugar ring of a nucleoside of a nucleic acid sequence and/or oligonucleotide (e.g., a synthetic oligonucleotide) with a “non-natural” or “non-native” substituent, or involves chemical modification of a native sugar ring. Sugar ring substituent groups include OH; F; O-, S-, or N-alkyl; O-, S-, or N-alkenyl; O-, S- or N-alkynyl; or O-alkyl-O-alkyl, wherein the alkyl, alkenyl and alkynyl may be substituted or unsubstituted C₁ to C₁₀ alkyl or C2 to C₁₀ alkenyl and alkynyl. These include O[(CH₂)ₙO]ₘCH₃, O(CH₂)ₙOCH₃, O(CH₂)ₙNH₂, O(CH₂)ₙCH₃, O(CH₂)₂ONH₂, and O(CH₂)ₙON[(CH₂)ₙCH₃]₂, where n and m are from 1 to about 10. Other substituent groups include C₁ to C₁₀ lower alkyl, substituted lower alkyl, alkenyl, alkynyl, alkaryl, aralkyl, O-alkaryl or O-aralkyl, SH, SCH₃, OCN, Cl, Br, CN, CF₃, OCF₃, SOCH₃, SO₂CH₃, ONO₂, NO₂, N₃, NH₂, heterocycloalkyl, heterocycloalkaryl, aminoalkylamino, polyalkylamino, substituted silyl, an RNA cleaving group, a reporter group, an intercalator, a group for improving the pharmacokinetic properties of an oligonucleotide or a group for improving the pharmacodynamic properties of an oligonucleotide, and other substituents having similar properties. In some embodiments, a sugar modification includes a 2′-O-methoxyethoxy (2′-O—CH₂CH₂OCH₃, also known as 2′-O-(2-methoxyethyl) or 2′-MOE; i.e., an alkoxyalkoxy group), a 2′-dimethylaminooxyethoxy (i.e., a O(CH₂)₂ON(CH₃)₂ group, also known as 2′-DMAOE), or 2′-dimethylaminoethoxyethoxy (also known as 2′-O-dimethyl-amino-ethoxy-ethyl or 2′-DMAEOE; i.e., 2′-O—CH₂—O—CH₂—N(CH₃)₂). In some embodiments, a sugar modification includes an LNA modification, a 2′-O-Me modification, or a 2′-MOE modification.

[0123] In some embodiments, a nucleic acid sequence and/or oligonucleotide (e.g., synthetic oligonucleotide) disclosed herein comprises an internucleoside linkage modification. In some embodiments, an internucleoside linkage modification involves replacement of a “natural” or “native” internucleoside linkage of a nucleic acid sequence and/or oligonucleotide (e.g., a synthetic oligonucleotide) with a “non-natural” or “non-native” substituent, or involves chemical modification of a native internucleoside linkage. In some embodiments, an internucleoside linkage modification may comprise replacement of an oxygen of the phosphate group in the 3′,5′-phosphodiester bond with a substituent atom or a substituent group, or may comprise replacement of the 3′-5′-phosphodiester bond or both the 3′,5′-phosphodiester bond and the sugar moiety to facilitate linkage of one nucleobase of a nucleic acid molecule to the next. Non-limiting examples of modified internucleoside linkages include phosphorothioate, phosphorodithioate, N3′ phosphoramidate, boranophosphate, 2′,5′-phosphodiester, phosphonoacetate (PACE), methylphosphonate, morpholino, amide, and peptide nucleic acid linkages. In some embodiments, an internucleoside linkage modification comprised in a nucleic acid sequence and/or oligonucleotide (e.g., synthetic oligonucleotide) disclosed herein is a phosphorothioate internucleoside linkage modification.

[0124] In some embodiments, a nucleic acid sequence and/or oligonucleotide (e.g., a synthetic oligonucleotide) comprises a modified backbone. In some embodiments, the modified backbone comprises modified internucleoside linkages. In some embodiments, the modified backbone comprises one or more phosphorothioate internucleoside linkages. In some embodiments, all of the internucleoside linkages of the oligonucleotide are phosphorothioate internucleoside linkages. In some embodiments, modified internucleoside linkages (e.g., linkages within a modified backbone) that do not include a phosphorus atom therein have internucleoside linkages that are formed by short chain alkyl or cycloalkyl internucleoside linkages, mixed heteroatoms and alkyl or cycloalkyl internucleoside linkages, or one or more short chain heteroatomic or heterocyclic internucleoside linkages. These include those having morpholino linkages (formed in part from the sugar portion of a nucleoside); siloxane backbones; sulfide, sulfoxide and sulfone backbones; formacetyl and thioformacetyl backbones; methylene formacetyl and thioformacetyl backbones; alkene containing backbones; sulfamate backbones; methyleneimino and methylenehydrazino backbones; sulfonate and sulfonamide backbones, amide backbones; and others having mixed N, O, S and CH2 component parts.

[0125] Non-limiting examples of modified internucleoside linkages include phosphorothioates, chiral phosphorothioates, phosphorodithioates, phosphotriesters, aminoalkylphosphotriesters, methyl and other alkyl phosphonates including 3′-alkylene phosphonates and chiral phosphonates, phosphinates, phosphoramidates including 3′-amino phosphoramidate and aminoalkylphosphoramidates, thionophosphoramidates, thionoalkylphosphonates, thionoalkylphosphotriesters, and boranophosphates having normal 3′-5′ linkages, 2′-5′ linked analogs of these, and those having inverted polarity wherein the adjacent pairs of nucleoside units are linked 3′-5′ to 5′-3′ or 2′-5′ to 5′-2′. Various salts, mixed salts and free acid forms are also included.

[0126] Substituted sugar moieties include, but are not limited to one of the following at the 2′ position: H (deoxyribose); OH (ribose); F; O-, S-, or N-alkyl; O-, S-, or N-alkenyl; O-, S- or N-alkynyl; or O-alkyl-O-alkyl, wherein the alkyl, alkenyl and alkynyl can be substituted or unsubstituted C1 to C10 alkyl or C2 to C10 alkenyl and alkynyl.

[0127] In some embodiments, a synthetic oligonucleotide includes, for example, at least one nucleotide or nucleoside modified at the 2′ position of the sugar. In some embodiments, the nucleoside modification is a 2′-O-alkyl, 2′-O-alkyl-O-alkyl or 2′-fluoro-modified nucleotide or an end cap. In some embodiments, nucleoside modifications include 2′-fluoro, 2′-amino and 2′ O-methyl modifications on the ribose of pyrimidines, abasic residues or an inverted base at the 3′ end of the oligonucleotide. In some embodiments, a synthetic oligonucleotide includes a single modified nucleoside. In some embodiments, a synthetic oligonucleotide includes at least two modified nucleosides, at least 3, at least 4, at least 5, at least 6, at least 7, at least 8, at least 9, at least 10, at least 15, at least 20 or more nucleosides, up to the entire length of the oligonucleotide (e.g., synthetic oligonucleotide). In some embodiments, each nucleoside of the synthetic oligonucleotide is a modified nucleoside.

[0128] In some embodiments, nucleosides or nucleobases include the natural purine bases adenine (A) and guanine (G), and the pyrimidine bases thymine (T), cytosine (C) and uracil (U). In some embodiments, modified nucleosides include other synthetic and natural nucleobases such as inosine, xanthine, hypoxanthine, nubularine, isoguanisine, tubercidine, 2-(halo)adenine, 2-(alkyl)adenine, 2-(propyl)adenine, 2 (amino)adenine, 2-(aminoalkyll)adenine, 2 (aminopropyl)adenine, 2 (methylthio) N6 (isopentenyl)adenine, 6 (alkyl)adenine, 6 (methyl)adenine, 7 (deaza)adenine, 8 (alkenyl)adenine, 8-(alkyl)adenine, 8 (alkynyl)adenine, 8 (amino)adenine, 8-(halo)adenine, 8-(hydroxyl)adenine, 8 (thioalkyl) adenine, 8-(thiol)adenine, N6-(isopentyl)adenine, N6 (methyl)adenine, N6, N6 (dimethyl)adenine, 2-(alkyl)guanine, 2 (propyl)guanine, 6-(alkyl)guanine, 6 (methyl)guanine, 7 (alkyl)guanine, 7 (methyl)guanine, 7 (deaza)guanine, 8 (alkyl)guanine, 8-(alkenyl)guanine, 8 (alkynyl)guanine, 8-(amino)guanine, 8 (halo)guanine, 8-(hydroxyl)guanine, 8 (thioalkyl)guanine, 8-(thiol)guanine, N (methyl)guanine, 2-(thio)cytosine, 3 (deaza) 5 (aza)cytosine, 3-(alkyl)cytosine, 3 (methyl)cytosine, 5-(alkyl)cytosine, 5-(alkynyl)cytosine, 5 (halo)cytosine, 5 (methyl)cytosine, 5 (propynyl)cytosine, 5 (propynyl)cytosine, 5 (trifluoromethyl)cytosine, 6-(azo)cytosine, N4 (acetyl)cytosine, 3 (3 amino-3 carboxypropyl)uracil, 2-(thio)uracil, 5 (methyl) 2 (thio)uracil, 5 (methylaminomethyl)-2 (thio)uracil, 4-(thio)uracil, 5 (methyl) 4 (thio)uracil, 5 (methylaminomethyl)-4 (thio)uracil, 5 (methyl) 2,4 (dithio)uracil, 5 (methylaminomethyl)-2,4 (dithio)uracil, 5 (2-aminopropyl)uracil, 5-(alkyl)uracil, 5-(alkynyl)uracil, 5-(allylamino)uracil, 5 (aminoallyl)uracil, 5 (aminoalkyl)uracil, 5 (guanidiniumalkyl)uracil, 5 (1,3-diazole-1-alkyl)uracil, 5-(cyanoalkyl)uracil, 5-(dialkylaminoalkyl)uracil, 5 (dimethylaminoalkyl)uracil, 5-(halo)uracil, 5-(methoxy)uracil, uracil-5 oxyacetic acid, 5 (methoxycarbonylmethyl)-2-(thio)uracil, 5 (methoxycarbonyl-methyl)uracil, 5 (propynyl)uracil, 5 (propynyl)uracil, 5 (trifluoromethyl)uracil, 6 (azo)uracil, dihydrouracil, N3 (methyl)uracil, 5-uracil (i.e., pseudouracil), 2 (thio)pseudouracil, 4 (thio)pseudouracil, 2,4-(dithio)psuedouracil, 5-(alkyl)pseudouracil, 5-(methyl)pseudouracil, 5-(alkyl)-2-(thio)pseudouracil, 5-(methyl)-2-(thio)pseudouracil, 5-(alkyl)-4 (thio)pseudouracil, 5-(methyl)-4 (thio)pseudouracil, 5-(alkyl)-2,4 (dithio)pseudouracil, 5-(methyl)-2,4 (dithio)pseudouracil, 1 substituted pseudouracil, 1 substituted 2(thio)-pseudouracil, 1 substituted 4 (thio)pseudouracil, 1 substituted 2,4-(dithio)pseudouracil, 1 (aminocarbonylethylenyl)-pseudouracil, 1 (aminocarbonylethylenyl)-2(thio)-pseudouracil, 1 (aminocarbonylethylenyl)-4 (thio)pseudouracil, 1 aminocarbonylethylenyl)-2,4-(dithio)pseudouracil, 1 (arninoalkylarninocarbonylethylenyl)-pseudouracil, 1 (arninoalkylarnino-carbonylethylenyl)-2(thio)-pseudouracil, 1(arninoalkylarninocarbonylethylenyl)-4 (thio)pseudouracil, 1 (arninoalkylarninocarbonylethylenyl)-2,4-(dithio)pseudouracil, 1,3-(diaza)-2-(oxo)-phenoxazin-1-yl, 1-(aza)-2-(thio)-3-(aza)-phenoxazin-1-yl, 1,3-(diaza)-2-(oxo)-phenthiazin-1-yl, 1-(aza)-2-(thio)-3-(aza)-phenthiazin-1-yl, 7-substituted 1,3-(diaza)-2-(oxo)-phenoxazin-1-yl, 7-substituted 1-(aza)-2-(thio)-3-(aza)-phenoxazin-1-yl, 7-substituted 1,3-(diaza)-2-(oxo)-phenthiazin-1-yl, 7-substituted 1-(aza)-2-(thio)-3-(aza)-phenthiazin-1-yl, 7-(arninoalkylhydroxy)-1,3-(diaza)-2-(oxo)-phenoxazin-1-yl, 7-(arninoalkylhydroxy)-1-(aza)-2-(thio)-3-(aza)-phenoxazin-1-yl, 7-(aminoalkylhydroxy)-1,3-(diaza)-2-(oxo)-phenthiazin-1-yl, 7-(aminoalkylhydroxy)-1-(aza)-2-(thio)-3-(aza)-phenthiazin-1-yl, 7-(guanidiniumalkylhydroxy)-1,3-(diaza)-2-(oxo)-phenoxazin-1-yl, 7-(guanidiniumalkylhydroxy)-1-(aza)-2-(thio)-3-(aza)-phenoxazin-1-yl, 7-(guanidiniumalkyl-hydroxy)-1,3-(diaza)-2-(oxo)-phenthiazin-1-yl, 7-(guanidiniumalkylhydroxy)-1-(aza)-2-(thio)-3-(aza)-phenthiazin-1-yl, 1,3,5-(triaza)-2,6-(dioxa)-naphthalene, inosine, xanthine, hypoxanthine, nubularine, tubercidine, isoguanisine, inosinyl, 2-aza-inosinyl, 7-deaza-inosinyl, nitroimidazolyl, nitropyrazolyl, nitrobenzimidazolyl, nitroindazolyl, aminoindolyl, pyrrolopyrimidinyl, 3-(methyl)isocarbostyrilyl, 5-(methyl)isocarbostyrilyl, 3-(methyl)-7-(propynyl)isocarbostyrilyl, 7-(aza)indolyl, 6-(methyl)-7-(aza)indolyl, imidizopyridinyl, 9-(methyl)-imidizopyridinyl, pyrrolopyrizinyl, isocarbostyrilyl, 7-(propynyl)isocarbostyrilyl, propynyl-7-(aza)indolyl, 2,4,5-(trimethyl)phenyl, 4-(methyl)indolyl, 4,6-(dimethyl)indolyl, phenyl, napthalenyl, anthracenyl, phenanthracenyl, pyrenyl, stilbenyl, tetracenyl, pentacenyl, diiluorotolyl, 4-(iluoro)-6-(methyl)benzimidazole, 4-(methyl)benzimidazole, 6-(azo)thymine, 2-pyridinone, 5 nitroindole, 3 nitropyrrole, 6-(aza)pyrimidine, 2 (amino)purine, 2,6-(diamino) purine, 5 substituted pyrimidines, N2-substituted purines, N6-substituted purines, 06-substituted purines, substituted 1,2,4-triazoles, pyrrolo-pyrimidin-2-on-3-yl, 6-phenyl-pyrrolo-pyrimidin-2-on-3-yl, para-substituted-6-phenyl-pyrrolo-pyrimidin-2-on-3-yl, ortho-substituted-6-phenyl-pyrrolo-pyrimidin-2-on-3-yl, bis-ortho-substituted-6-phenyl-pyrrolo-pyrimidin-2-on-3-yl, para-(aminoalkylhydroxy)-6-phenyl-pyrrolo-pyrimidin-2-on-3-yl, ortho-(aminoalkylhydroxy)-6-phenyl-pyrrolo-pyrimidin-2-on-3-yl, bis-ortho-(aminoalkylhydroxy)-6-phenyl-pyrrolo-pyrimidin-2-on-3-yl, pyridopyrimidin-3-yl, 2-oxo-7-amino-pyridopyrimidin-3-yl, 2-oxo-pyridopyrimidine-3-yl, or any O-alkylated or N-alkylated derivatives thereof.

[0129] In some embodiments, a synthetic oligonucleotide is a chimeric oligonucleotide. Chimeric oligonucleotides may be formed as composite structures of two or more oligonucleotides, modified oligonucleotides, and/or oligonucleotide mimetics. Such compounds have also been referred to in the art as hybrids or mixed backbone or chimeric or gapmers. In particular a gapmer is an oligonucleotide that has at least three discrete portions, two of which are similar i.e. include one or more backbone modifications or include one or more nucleoside modifications, and surround a region that is distinct, i.e., does not include backbone modifications or does not include nucleoside modifications.

[0130] In some embodiments, a “plurality of synthetic oligonucleotides” refers to two or more synthetic oligonucleotides. In some embodiments, the plurality of two or more synthetic oligonucleotides refers to a plurality of first synthetic oligonucleotides that form a first population of synthetic oligonucleotides. In some embodiments, the plurality of two or more synthetic oligonucleotides refers to a plurality of second synthetic oligonucleotides that form a second population of synthetic oligonucleotides.

[0131] In some embodiments, the plurality of synthetic oligonucleotides (e.g., in a first population of synthetic oligonucleotides, in a second population of synthetic oligonucleotides, etc.) comprises two, three, four, five, six, seven, eight, nine, 10, 11, 12, 13, 14, 15, 16, 17, 18, 19, 20, 25, 30, 35, 40, 45, 50, 60, 70, 80, 90, 100, 150, 200, 250, 300, 350, 400, 450, 500, 600, 700, 800, 900, 1000, 1500, 2000, 2500, or more than 2,500 synthetic oligonucleotides, or any range or combination thereof. In some embodiments, the plurality of synthetic oligonucleotides (e.g., in a first population of synthetic oligonucleotides, in a second population of synthetic oligonucleotides, etc.) comprises from two to 2,000 synthetic oligonucleotides.

[0132] In some embodiments, the plurality of synthetic oligonucleotides (e.g., in a first population of synthetic oligonucleotides, in a second population of synthetic oligonucleotides, etc.) comprises at least two, at least three, at least four, at least five, at least six, at least seven, at least eight, at least nine, at least 10, at least 11, at least 12, at least 13, at least 14, at least 15, at least 16, at least 17, at least 18, at least 19, at least 20, at least 25, at least 30, at least 35, at least 40, at least 45, at least 50, at least 60, at least 70, at least 80, at least 90, at least 100, at least 150, at least 200, at least 250, at least 300, at least 350, at least 400, at least 450, at least 500, at least 600, at least 700, at least 800, at least 900, at least 1000, at least 1500, at least 2000, or at least 2500, or any range or combination thereof. In some embodiments, the two or more synthetic oligonucleotides in the plurality of synthetic oligonucleotides (e.g., in a first population of synthetic oligonucleotides, in a second population of synthetic oligonucleotides, etc.) each comprise nucleic acid sequences, which are not the same, such as any of the nucleic acid sequences disclosed herein.

[0133] As used herein, the phrase “the first synthetic oligonucleotide and second synthetic oligonucleotide are not the same” or equivalent phrases are used to refer to two synthetic oligonucleotides which differ in at least one of nucleic acid sequence, structure, length, and modification (e.g., base and/or backbone modifications, etc.). In some embodiments, two or more synthetic oligonucleotides which are not the same have different nucleic acid sequences (e.g., the two or more synthetic oligonucleotides have one or more nucleotides which are not the same when the two or more synthetic oligonucleotides are aligned in the same direction, such as in a 5′ to 3′ direction). In some embodiments, two or more oligonucleotides which are not the same have sequences which have different sequences that differ in at least one or more different nucleotides or nucleosides. In some embodiments, the first synthetic oligonucleotide and second synthetic oligonucleotide that are not the same have one or more nucleotide substitutions at one or more corresponding positions within the oligonucleotide relative to one another. In some embodiments, two or more oligonucleotides which are not the same have one or more different internucleoside linkages at one or more positions within the oligonucleotide. In some embodiments, two or more synthetic oligonucleotides which are not the same comprise, consist of, or consist essentially of sequences with different SEQ ID NOs, according to any of the SEQ ID NOs disclosed herein.

[0134] For instance, in a non-limiting example, two or more synthetic oligonucleotides which are not the same refers to one or a first synthetic oligonucleotide having one or a first SEQ ID NO disclosed herein and a second synthetic oligonucleotide having one or a second SEQ ID NO disclosed herein, wherein the first SEQ ID NO and the second SEQ ID NO are not the same SEQ ID NO. In some embodiments, two or more nucleic acid sequences which are not the same comprise or consist of or consist essentially of sequences with different SEQ ID NOs, according to any of the SEQ ID NOs disclosed herein.

[0135] As disclosed herein, an oligonucleotide (e.g., a synthetic oligonucleotide) is “complementary” or “sufficiently complementary” to a nucleic acid (e.g. a region of a KLK gene disclosed herein) when hybridization can occur in an antiparallel configuration between the oligonucleotide (e.g., a synthetic oligonucleotide) and the nucleic acid. A double-stranded nucleic acid or oligonucleotide (e.g. synthetic oligonucleotide) can be “complementary” or “sufficiently complementary” to another nucleic acid or oligonucleotide (e.g., a synthetic oligonucleotide) if hybridization can occur between one of the strands of the first nucleic acid or oligonucleotide and the second nucleic acid or oligonucleotide (e.g., a synthetic oligonucleotide). Complementarity (e.g., the degree to which one polynucleotide is complementary with another) is quantifiable in terms of the proportion of bases in opposing strands that are expected to form hydrogen bonds with each other, according to generally accepted base pairing (e.g., Watson-Crick base pairing) rules. An oligonucleotide (e.g., a synthetic oligonucleotide) may be complementary to or sufficiently complementary to a region of a nucleic acid even if the two base sequences are not 100% complementary, as long as the duplex structure formed between has the desired stability.

[0136] In some embodiments, two nucleic acids are considered complementary to or sufficiently complementary to one another when their nucleic acid sequences are able to form base pairing interactions (e.g., Watson-Crick base pairing interactions) between at least or about 45%, at least or about 50%, at least or about 55%, at least or about 60%, at least or about 65%, at least or about 70%, at least or about 75%, at least or about 80%, at least or about 85%, at least or about 90%, at least or about 95%, at least or about 96%, at least or about 97%, at least or about 98%, at least or about 99%, or about 100% of their nucleotides, or any range or combination thereof. In some embodiments, two nucleic acid sequences are considered complementary to or sufficiently complementary to one another when their nucleic acid sequences form base pairing interactions (e.g., Watson-Crick base pairing interactions) between at least or about 45% of their nucleotides.

[0137] In some embodiments, two nucleic acid sequences are considered complementary to or sufficiently complementary to one another when their nucleic acid sequences form base pairing interactions between at least or about 50% of their nucleotides.

[0138] In some embodiments, two nucleic acid sequences are considered complementary to or sufficiently complementary to one another when their nucleic acid sequences form base pairing interactions between at least or about 55% of their nucleotides.

[0139] In some embodiments, two nucleic acid sequences are considered complementary to or sufficiently complementary to one another when their nucleic acid sequences form base pairing interactions between at least or about 60% of their nucleotides.

[0140] In some embodiments, two nucleic acid sequences are considered complementary to or sufficiently complementary to one another when their nucleic acid sequences form base pairing interactions between at least or about 65% of their nucleotides.

[0141] In some embodiments, two nucleic acid sequences are considered complementary to or sufficiently complementary to one another when their nucleic acid sequences form base pairing interactions between at least or about 70% of their nucleotides.

[0142] In some embodiments, two nucleic acid sequences are considered complementary to or sufficiently complementary to one another when their nucleic acid sequences form base pairing interactions between at least or about 75% of their nucleotides.

[0143] In some embodiments, two nucleic acid sequences are considered complementary to or sufficiently complementary to one another when their nucleic acid sequences form base pairing interactions between at least or about 80% of their nucleotides.

[0144] In some embodiments, two nucleic acid sequences are considered complementary to or sufficiently complementary to one another when their nucleic acid sequences form base pairing interactions between at least or about 85% of their nucleotides.

[0145] In some embodiments, two nucleic acid sequences are considered complementary to or sufficiently complementary to one another when their nucleic acid sequences form base pairing interactions between at least or about 90% of their nucleotides.

[0146] In some embodiments, two nucleic acid sequences are considered complementary to or sufficiently complementary to one another when their nucleic acid sequences form base pairing interactions between at least or about 92.5% of their nucleotides.

[0147] In some embodiments, two nucleic acid sequences are considered complementary to or sufficiently complementary to one another when their nucleic acid sequences form base pairing interactions between at least or about 95% of their nucleotides.

[0148] In some embodiments, two nucleic acid sequences are considered complementary to or sufficiently complementary to one another when their nucleic acid sequences form base pairing interactions between at least or about 96% of their nucleotides.

[0149] In some embodiments, two nucleic acid sequences are considered complementary to or sufficiently complementary to one another when their nucleic acid sequences form base pairing interactions between at least or about 97% of their nucleotides.

[0150] In some embodiments, two nucleic acid sequences are considered complementary to or sufficiently complementary to one another when their nucleic acid sequences form base pairing interactions between at least or about 98% of their nucleotides.

[0151] In some embodiments, two nucleic acid sequences are considered complementary to or sufficiently complementary to one another when their nucleic acid sequences form base pairing interactions between at least or about 99% of their nucleotides.

[0152] In some embodiments, two nucleic acid sequences are considered complementary to or sufficiently complementary to one another when their nucleic acid sequences form base pairing interactions between at least or about 100% of their nucleotides.

[0153] In a non-limiting example, two nucleic acid sequences that are each 20 nucleosides in length are considered 80% complementary if 16 of their respective 20 nucleosides are able to form base-pairing interactions. Two nucleic acid sequences that are of different lengths may also be complementary. For example, a nucleic acid sequence that is 20 nucleosides in length may be complementary to or sufficiently complementary to a nucleic acid sequence that is longer if their sequences are able to form base pairing interactions (e.g., Watson-Crick base pairing interactions) between a sufficient number of nucleotides of the 20 nucleoside length nucleic acid sequence and a sufficient number of nucleotides of the longer nucleic acid sequence. A nucleic acid sequence that is 20 nucleosides in length is considered 100% complementary to or sufficiently complementary to a longer nucleic acid sequence if all 20 of its nucleosides are able to form base-pairing interactions with 20 sequential nucleosides of the longer nucleic acid sequence. Similarly, a nucleic acid sequence that is 20 nucleosides in length is considered 80% complementary to or sufficiently complementary to a longer nucleic acid sequence if 16 of its 20 nucleosides are able to form base-pairing interactions with 16 nucleosides of the longer nucleic acid sequence in a complementary sequence alignment.

[0154] In some embodiments, a synthetic oligonucleotide comprises a molecular species. In some embodiments, the molecular species anchors the synthetic oligonucleotide to the core (e.g., liposome core) of an SNA disclosed herein. A molecular species may be attached at various positions of a synthetic oligonucleotide (e.g., the 3′-end or 5′-end of a nucleic acid sequence of a synthetic oligonucleotide disclosed herein). In some embodiments, the molecular species enhances the stability of the synthetic oligonucleotide against 3′- or 5′-exonucleases. In some embodiments, a molecular species is attached to or associated with an internal nucleotide or a nucleotide on a branch of a synthetic oligonucleotide. In some embodiments, a molecular species is attached to a 2-position of a nucleoside of a synthetic oligonucleotide. In some embodiments, a molecular species is linked to the heterocyclic base of a nucleoside of a synthetic oligonucleotide.

[0155] In some embodiments, the molecular species is modified. In some embodiments, the molecular species comprises multiple moieties. In some embodiments, the molecular species is, comprises, consists essentially of, or consists of a lipophilic (i.e., hydrophobic) moiety. In some embodiments, the molecular species is, comprises, consists essentially of, or consists of a lipophilic (i.e., hydrophobic) moiety and a hydrophilic moiety. In some embodiments, the molecular species comprises multiple lipophilic (i.e., hydrophobic) moieties and/or multiple hydrophilic moieties. In some embodiments, the molecular species is, comprises, consists essentially of, or consists of a hydrophobic moiety, such as a cholesterol or a cholesteryl ester.

[0156] In some embodiments, the molecular species is, comprises, consists essentially of, or consists of a cholesterol and an additional moiety. In some embodiments, the molecular species is, comprises, consists essentially of, or consists of a cholesterol and a hydrophilic moiety. In some embodiments, the molecular species comprises a cholesterol and a triethylene glycol (TEG). In some embodiments, the molecular species comprises one or more cholesterols and one or more TEGs. In some embodiments, the molecular species comprises a cholesterol and a TEG. In some embodiments, the molecular species comprises, consists essentially of, or consists of a cholesterol linked to a TEG. In some embodiments, the molecular species is a cholesteryl ester. In some embodiments, the molecular species is a cholesteryl ester linked to a TEG. In some embodiments, the molecular species is, comprises, consists essentially of, or consists of N-cholesteryl-3-aminopropyl-triethyleneglycol-glyceryl-1-O-phosphodiester (3CholTEG).

[0157] In some embodiments, the molecular species is a lipid, a sterol, lipid moieties such as a cholesterol moiety, cholic acid, a thioether (e.g., hexyl-S-tritylthiol), a thiocholesterol, an aliphatic chain (e.g., dodecandiol or undecyl residues), a phospholipid (e.g., di-hexadecyl-rac-glycerol or triethylammonium 1,2-di-O-hexadecyl-rac-glycero-3-H-phosphonate), a polyamine or a polyethylene glycol chain, or adamantane acetic acid, a palmityl moiety, an octadecylamine or hexylamino-carbonyl-oxycholesterol moiety, stearyl, C16 alkyl chain, bile acids, cholic acid, taurocholic acid, deoxycholate, oleyl litocholic acid, oleoyl cholenic acid, glycolipids, phospholipids, sphingolipids, isoprenoids, such as steroids, vitamins, such as vitamin E, saturated fatty acids, unsaturated fatty acids, fatty acid esters, such as triglycerides, pyrenes, porphyrines, Texaphyrine, adamantane, acridines, biotin, coumarin, fluorescein, rhodamine, Texas-Red, digoxygenin, dimethoxytrityl, t-butyldimethylsilyl, t-butyldiphenylsilyl, cyanine dyes (e.g. Cy3 or Cy576), Hoechst 33258 dye, psoralen, or ibuprofen.

[0158] In some embodiments, oligonucleotides (e.g., synthetic oligonucleotides) are anchored to the surface of a core through a molecular species. In some embodiments, the molecular species is tocopherols, sphingolipids such as sphingosine, sphingosine phosphate, methylated sphingosines and sphinganines, ceramides, ceramide phosphates, 1-0 acyl ceramides, dihydroceramides, 2-hydroxy ceramides, sphingomyelin, glycosylated sphingolipids, sulfatides, gangliosides, phosphosphingolipids, and phytosphingosines of various lengths and saturation states and their derivatives, phospholipids such as phosphatidylcholines, lysophosphatidylcholines, phosphatidic acids, lysophosphatidic acids, cyclic LPA, phosphatidylethanolamines, lysophosphatidylethanolamines, phosphatidylglycerols, lysophosphatidylglycerols, phosphatidylserines, lysophosphatidylserines, phosphatidylinositols, inositol phosphates, LPI, cardiolipins, lysocardiolipins, bis(monoacylglycero) phosphates, (diacylglycero) phosphates, ether lipids, diphytanyl ether lipids, and plasmalogens of various lengths, saturation states, and their derivatives, sterols such as cholesterol, desmosterol, stigmasterol, lanosterol, lathosterol, diosgenin, sitosterol, zymosterol, zymostenol, 14-demethyl-lanosterol, cholesterol sulfate, DHEA, DHEA sulfate, 14-demethyl-14-dehydrlanosterol, sitostanol, campesterol, ether anionic lipids, ether cationic lipids, lanthanide chelating lipids, A-ring substituted oxysterols, B-ring substituted oxysterols, D-ring substituted oxysterols, side-chain substituted oxysterols, double substituted oxysterols, cholestanoic acid derivatives, fluorinated sterols, fluorescent sterols, sulfonated sterols, phosphorylated sterols, and polyunsaturated sterols of different lengths, saturation states, and their derivatives.

[0159] In some embodiments, a molecular species is connected to a synthetic oligonucleotide through a linker. In some embodiments, the linker is a spacer (e.g., a non-nucleotidic spacer). Non-limiting examples of a spacer are abasic residues (dSpacer), oligoethyleneglycol, such as triethyleneglycol (spacer 9 or iSp9; TEG) or hexaethylenegylcol (spacer 18 or iSp18; HEG), or alkane-diol (e.g., butanediol). In some embodiments, the synthetic oligonucleotide is attached to the spacer through a covalent bond (e.g., phosphodiester, phosphorodithioate or phosphorothioate bond). In some embodiments, the spacer does not comprise or consist of an oligonucleotide spacer. The spacer in some embodiments appears just once in the molecule or in some embodiments is incorporated several times (e.g., via phosphodiester, phosphorothioate, methylphosphonate, or amide linkages). In embodiments in which multiple spacer moieties are incorporated, the individual spacer moieties may be attached to one another and/or to the synthetic oligonucleotide via phosphodiester, phosphorothioate, methylphosphonate, or amide linkages. In some embodiments, the spacer comprises a TEG and/or a HEG. In some embodiments, the spacer comprises, consists essentially of, or consists of hexa(ethyleneglycol)phosphodiester-hexa(ethyleneglycol)phosphodiester (HEG-HEG). In some embodiments, the molecular species connected to the spacer comprises, consists essentially of, or consists of hexa(ethyleneglycol)phosphodiester-hexa(ethyleneglycol)phosphodiester-3-O—(N-cholesteryl-3-aminopropyl)-triethyleneglycol-glyceryl-1-O-phosphodiester (HEG-HEG-CholTEG or CholTEG-HEG-HEG). The HEG-HEG-CholTEG or CholTEG-HEG-HEG may be connected (e.g., directly or indirectly) to the 5′-end and/or the 3′-end of a nucleic acid or oligonucleotide (e.g., synthetic oligonucleotide) disclosed herein.

[0160] In some embodiments, kallikrein-related peptidase or “KLK” gene refers to an allele, alleles, a genomic locus or genomic loci corresponding to a KLK gene in an organism (e.g., KLKB1, KLK1, KLK2, KLK3, KLK4, KLK5, KLK6, KLK7, KLK8, KLK9, KLK10, KLK11, KLK12, KLK13, KLK14, or KLK15 in humans). In some embodiments, the KLK gene corresponds to the nucleic acid sequence of SEQ ID NO: 7477, SEQ ID NO: 7478, SEQ ID NO: 7575 or SEQ ID NO: 7576. In some embodiments, the KLK gene is KLK5 or KLK7.

[0161] In some embodiments, a KLK gene comprises, consists essentially of, or consists of a nucleic acid sequence of SEQ ID NO: 7477, SEQ ID NO: 7478, SEQ ID NO: 7575 or SEQ ID NO: 7576. In some embodiments, a KLK gene comprises a kallikrein-related peptidase genomic locus or a KLK polynucleotide. As disclosed herein, a “KLK gene product” refers to a KLK pre-mRNA, a KLK mRNA, a KLK coding sequence (e.g., a cDNA, synthetic RNA coding sequence, or synthetic DNA coding sequence), a KLK polypeptide, a KLK preprotein, or a KLK protein. In some embodiments, a KLK gene comprises a kallikrein-related peptidase 5 (KLK5) genomic locus or a KLK5 polynucleotide. In some embodiments, a “KLK gene product” refers to a KLK5 pre-mRNA, a KLK5 mRNA, a KLK5 coding sequence (e.g., a cDNA, synthetic RNA coding sequence, or synthetic DNA coding sequence), a KLK5 polypeptide, a KLK5 preprotein, or a KLK5 protein. In some embodiments, a KLK gene comprises a kallikrein-related peptidase 7 (KLK7) genomic locus or a KLK7 polynucleotide. In some embodiments, a “KLK gene product” refers to a KLK7 pre-mRNA, a KLK7 mRNA, a KLK7 coding sequence (e.g., a cDNA, synthetic RNA coding sequence, or synthetic DNA coding sequence), a KLK7 polypeptide, a KLK7 preprotein, or a KLK7 protein.

[0162] In some embodiments, a region of a kallikrein-related peptidase (KLK) gene refers to a segment of an allele, a genomic locus, or a polynucleotide corresponding to a KLK gene (e.g., an allele, genomic locus, or polynucleotide corresponding to human KLKB1, KLK1, KLK2, KLK3, KLK4, KLK5, KLK6, KLK7, KLK8, KLK9, KLK10, KLK11, KLK12, KLK13, KLK14, or KLK15). In some embodiments, the region is a nucleotide sequence within at least one of a 5′-UTR, a 3′-UTR, an enhancer region, a silencer region, a regulatory region, an intron, an exon, a promoter region, a coding region, a termination region, or any combination thereof. As disclosed herein, a “region of a KLK gene product” or equivalent phrases refer to a region in a KLK pre-mRNA, a KLK mRNA, a KLK coding sequence (e.g., a cDNA, synthetic RNA coding sequence, or synthetic DNA coding sequence), a KLK polypeptide, a KLK preprotein, or a KLK protein. In some embodiments, a “region of a KLK gene product” is a region of a KLK5 gene product, such as a region in a KLK5 pre-mRNA, a KLK5 mRNA, a KLK5 coding sequence (e.g., a cDNA, synthetic RNA coding sequence, or synthetic DNA coding sequence), a KLK5 polypeptide, a KLK5 preprotein, or a KLK5 protein. In some embodiments, a “region of a KLK gene product” is a region of a KLK7 gene product, such as a region in a KLK7 pre-mRNA, a KLK7 mRNA, a KLK7 coding sequence (e.g., a cDNA, synthetic RNA coding sequence, or synthetic DNA coding sequence), a KLK7 polypeptide, a KLK7 preprotein, or a KLK7 protein.

[0163] In some embodiments, the region of a KLK gene or a KLK gene product is within an exon of a KLK5 or KLK7 gene or gene product. In some embodiments, the region is within exon 1 (nucleotides 1-292 of SEQ ID NO: 7575), exon 2 (nucleotides 293-376 of SEQ ID NO: 7575), exon 3 (nucleotides 377-638 of SEQ ID NO: 7575), exon 4 (nucleotides 639-895 of SEQ ID NO; 7575), exon 5 (nucleotides 896-1029 of SEQ ID NO: 7575), or exon 6 (nucleotides 1030-1513 of SEQ ID NO; 7575) of a KLK5 gene or gene product. In some embodiments, the region is within exon 1 (nucleotides 1-67 of SEQ ID NO: 7576), exon 2 (nucleotides 68-198 of SEQ ID NO: 7576), exon 3 (nucleotides 199-346 of SEQ ID NO: 7576), exon 4 (nucleotides 347-594 of SEQ ID NO: 7576), exon 5 (nucleotides 595-731 of SEQ ID NO: 7576), or exon 6 (nucleotides 732-1955 of SEQ ID NO: 7576) of a KLK7 gene or gene product.

[0164] In some embodiments, the region is within exon 6 of a KLK5 gene or gene product. In some embodiments, the region is within exon 5 of a KLK7 gene or gene product. In some embodiments, the region is within exon 1, exon 3, exon 4, or exon 6 of a KLK7 gene or gene product. In some embodiments, the region of a KLK gene or a KLK gene product is partially or spans within two exons of a KLK5 or KLK7 gene or gene product. As a non-limiting example, the region may be partially within exon 5 and partially within exon 6 of a KLK7 gene product. In some embodiments, the region is within a 5′UTR or a 3′-UTR of an exon or a coding sequence of a KLK gene or KLK gene product. As a non-limiting example, the region may be within the 3′-UTR of exon 5 or exon 6 of a KLK5 gene product, or the region may be within the 3′-UTR of exon 6 of a KLK7 gene product. In some embodiments, the region may be within the 5′-UTR of exon 1 or exon 2 of a KLK5 gene product, or the region may be within the 5′-UTR of exon 1 or exon 2 of a KLK7 gene product.

[0165] In some embodiments, the region of KLK gene or a KLK gene product is within a region of SEQ ID NO: 7477, SEQ ID NO: 7478, SEQ ID NO: 7575 or SEQ ID NO: 7576. In some embodiments, the region is entirely within, partially within, or approximately within the range of nucleotides 103-142 (e.g., nucleotides 110-136), nucleotides 305-344, nucleotides 820-920 (e.g., nucleotides 875-902), nucleotides 1152-1191 (e.g., nucleotides 1158-1185), or nucleotides 1259-1426 (e.g., nucleotides 1265-1300 or nucleotides 1393-1418) of SEQ ID NO: 7575. In some embodiments, the region is within a corresponding region of SEQ ID NO: 7477 or SEQ ID NO: 7577. In some embodiments, the region is within the range of nucleotides 1259-1426 of SEQ ID NO: 7575. In some embodiments, the region is entirely within, partially within, or approximately within the range of nucleotides 41-69, nucleotides 262-375 (e.g., nucleotides 265-290, nucleotides 266-355, nucleotides 302-327, or nucleotides 347-372), nucleotides 590-621 (e.g., nucleotides 593-618), nucleotides 722-753 (e.g., nucleotides 725-750), nucleotides 1460-1491 (e.g., nucleotides 1463-1488), or nucleotides 1616-1647 (e.g., nucleotides 1619-1644) of SEQ ID NO: 7576. In some embodiments, the region is within a corresponding region of SEQ ID NO: 7478 or SEQ ID NO: 7578. In some embodiments, the region is within the range of nucleotides 590-621 of SEQ ID NO: 7576.

[0166] As disclosed herein, a “spherical nucleic acid (SNA)” refers to a three-dimensional arrangement of nucleic acids or oligonucleotides, such as synthetic oligonucleotides, comprising an oligonucleotide shell, with radially arranged oligonucleotides on the exterior of a core. In some embodiments, the core is a hollow core produced by a three-dimensional arrangement of molecules which form the outer boundary of the core. For instance, the molecules may be in the form of a lipid layer (e.g., lipid monolayer or lipid bilayer), which has a hollow center. In some embodiments, the molecules may be in the form of lipids, such as amphipathic lipids (e.g., sterols), which are linked to or associated with, either directly or indirectly, an end of the oligonucleotide (e.g., synthetic oligonucleotide). In some embodiments, tocopherols or sterols, such as cholesterol, linked (e.g., indirectly attached) to an end of an oligonucleotide (e.g., a synthetic oligonucleotide) may associate with the outer surface of a core (e.g., a hollow core), such that the oligonucleotides radiate outward from the core.

[0167] In some embodiments, an SNA comprises an oligonucleotide shell comprising a synthetic oligonucleotide and a core. In some embodiments, a synthetic oligonucleotide is associated with the core (e.g., liposome core) through a covalent or non-covalent interaction. In some embodiments, a synthetic oligonucleotide is associated with the exterior surface of the core. In some embodiments, the synthetic oligonucleotides are associated with the core (e.g., exterior surface) through a molecular species via, for instance, a hydrophobic interaction. In some embodiments, the synthetic oligonucleotide is associated with a molecular species (e.g., a hydrophobic group), either directly or indirectly. In some embodiments, the synthetic oligonucleotide is indirectly associated with or indirectly attached to a molecular species (e.g., hydrophobic group) through a spacer. In some embodiments, the molecular species (e.g., hydrophobic group) is associated with the core. In some embodiments, the core is a liposome core. In some embodiments, the liposome core comprises a lipid bilayer. In some embodiments, the synthetic oligonucleotide is covalently attached to one or more lipids of the lipid layer. In some embodiments, the synthetic oligonucleotide is not covalently attached to one or more lipids of the lipid layer. In some embodiments, the synthetic oligonucleotide is covalently attached to a molecular species.

[0168] In some embodiments, an SNA disclosed herein comprises a first synthetic oligonucleotide comprising a first nucleic acid sequence and a second synthetic oligonucleotide comprising a second nucleic acid sequence. In some embodiments, a nucleic acid sequence (e.g., a nucleic acid sequence of a synthetic oligonucleotide) is indirectly attached to a molecular species. In some embodiments, a first molecular species is indirectly attached to a first nucleic acid sequence (e.g., a first nucleic acid sequence of a first synthetic oligonucleotide) and a second molecular species is indirectly attached to a second nucleic acid sequence (e.g., a second nucleic acid sequence of a second synthetic oligonucleotide). In some embodiments, the first molecular species is indirectly attached to the 3′-end of the first nucleic acid sequence and the second molecular species is indirectly attached to the 5′-end of the second nucleic acid sequence.

[0169] In some embodiments, the first molecular species is indirectly attached to the 5′-end of the first nucleic acid sequence and the second molecular species is indirectly attached to the 3′-end of the second nucleic acid sequence. In some embodiments, the first molecular species is indirectly attached to the 5′-end of the first synthetic oligonucleotide and the second molecular species is indirectly attached to the 5′-end of the second synthetic oligonucleotide. In some embodiments, the first molecular species is indirectly attached to the 3′-end of the first synthetic oligonucleotide and the second molecular species is indirectly attached to the 3′-end of the second synthetic oligonucleotide.

[0170] In some embodiments, an SNA disclosed herein comprises a first synthetic oligonucleotide comprising a first nucleic acid sequence and a second synthetic oligonucleotide comprising a second nucleic acid sequence. In some embodiments, a nucleic acid sequence (e.g., a nucleic acid sequence of a synthetic oligonucleotide) is directly attached to a molecular species. In some embodiments, a first molecular species is directly attached to a first nucleic acid sequence (e.g., a first nucleic acid sequence of a first synthetic oligonucleotide) and a second molecular species is directly attached to a second nucleic acid sequence (e.g., a second nucleic acid sequence of a second synthetic oligonucleotide). In some embodiments, the first molecular species is directly attached to the 3′-end of the first nucleic acid sequence and the second molecular species is directly attached to the 5′-end of the second nucleic acid sequence. In some embodiments, the first molecular species is directly attached to the 5′-end of the first nucleic acid sequence and the second molecular species is directly attached to the 3′-end of the second nucleic acid sequence. In some embodiments, the first molecular species is directly attached to the 5′-end of the first synthetic oligonucleotide and the second molecular species is directly attached to the 5′-end of the second synthetic oligonucleotide. In some embodiments, the first molecular species is directly attached to the 3′-end of the first synthetic oligonucleotide and the second molecular species is directly attached to the 3′-end of the second synthetic oligonucleotide.

[0171] In some embodiments, the core is a solid core or a hollow core.

[0172] In some embodiments, a solid core is a spherical-shaped material with or without a hollow center. As disclosed herein, a “spherical shape” refers to a general shape and does not imply or is not limited to a perfect sphere or round shape. In some embodiments, a spherical shape includes imperfections. In some embodiments, the core comprises, consists essentially of, or consists of a metal core (e.g., any metal). Non-limiting examples of metals include gold, silver, platinum, aluminum, palladium, copper, cobalt, indium, nickel and mixtures thereof. In some embodiments, the core comprises gold or is a gold core. In some embodiments, the core can be a lattice structure including degradable gold. In some embodiments, the core may comprise semiconductor and/or magnetic materials. Solid cores can be constructed from a wide variety of materials known to those skilled in the art including but not limited to: noble metals (gold, silver), transition metals (iron, cobalt) and metal oxides (silica). A solid core may be inert, paramagnetic, or superparamagnetic. The solid cores can be constructed from either pure compositions of described materials, or in combinations of mixtures of any number of materials, or in layered compositions of materials. In some embodiments, a solid core can be composed of a polymeric core such as amphiphilic block copolymers, hydrophobic polymers such as polystyrene, poly(lactic acid), poly(lactic co-glycolic acid), poly(glycolic acid), poly(caprolactone) and other biocompatible polymers known to those skilled in the art. In some embodiments, the core comprises, consists essentially of, or consists of a solid core or a semi-solid core.

[0173] In some embodiments, a hollow core has at least some space in the center region of a shell material. In some embodiments, a hollow core is a liposome core. A liposome core as used herein refers to a centrally located core compartment formed by a component of the lipids or phospholipids that form a lipid bilayer. “Liposomes” are artificial, self-closed vesicular structures of various sizes and shapes, where one or several membranes encapsulate an aqueous core. Most typically liposome membranes are formed from lipid bilayer membranes, where the hydrophilic head groups are oriented towards aqueous environments, and the lipid chains are oriented away from aqueous environments. Liposomes can be formed as well from other amphiphilic monomeric and polymeric molecules, such as polymers, like block copolymers, or polypeptides. Unilamellar vesicles are liposomes defined by a single membrane enclosing an aqueous space. In contrast, oligo- or multilamellar vesicles are built up of several membranes. Typically, the membranes are roughly 4 nm thick and are composed of amphiphilic lipids, such as phospholipids, of natural or synthetic origin. Optionally, the membrane properties can be modified by the incorporation of other lipids such as sterols or cholic acid derivatives.

[0174] The lipid bilayer is composed of two layers of lipids or lipid molecules. Each lipid or lipid molecule in a layer is oriented substantially parallel to adjacent lipids or lipid molecules, and two layers of lipids or lipid molecules that form a bilayer have the polar ends of their molecules exposed to the aqueous phase and the non-polar ends adjacent to each other. The two lipid layers that form the lipid bilayer are substantially parallel to one another. The central aqueous region of the liposomal core may be empty or filled fully or partially with water, an aqueous emulsion, oligonucleotides, or other therapeutic or diagnostic agents or aqueous solutions thereof.

[0175] A lipid bilayer or liposome core can be constructed from one or more lipids known to those in the art including but not limited to: 1,2-dioleoyl-sn-glycero-3-phosphocholine (DOPC), 1,2-dimyristoyl-sn-phosphatidylcholine (DMPC), 1-palmitoyl-2-oleoyl-sn-phosphatidylcholine (POPC), 1,2-distearoyl-sn-glycero-3-phospho-(1′-rac-glycerol) (DSPG), 1,2-dioleoyl-sn-glycero-3-phospho-(1′-rac-glycerol) (DOPG), 1,2-distearoyl-sn-glycero-3-phosphocholine (DSPC), 1,2-dipalmitoyl-sn-glycero-3-phosphocholine (DPPC), 1,2-di-(9Z-octadecenoyl)-sn-glycero-3-phosphoethanolamine (DOPE), and 1,2-dihexadecanoyl-sn-glycero-3-phosphoethanolamine (DPPE), sphingolipids such as sphingosine, sphingosine phosphate, methylated sphingosines and sphinganines, ceramides, ceramide phosphates, 1-0 acyl ceramides, dihydroceramides, 2-hydroxy ceramides, sphingomyelin, glycosylated sphingolipids, sulfatides, gangliosides, phosphosphingolipids, and phytosphingosines of various lengths and saturation states and their derivatives, phospholipids such as phosphatidylcholines, lysophosphatidylcholines, phosphatidic acids, lysophosphatidic acids, cyclic LPA, phosphatidylethanolamines, lysophosphatidylethanolamines, phosphatidylglycerols, lysophosphatidylglycerols, phosphatidylserines, lysophosphatidylserines, phosphatidylinositols, inositol phosphates, LPI, cardiolipins, lysocardiolipins, bis(monoacylglycero) phosphates, (diacylglycero) phosphates, ether lipids, diphytanyl ether lipids, and plasmalogens of various lengths, saturation states, and their derivatives, sterols such as cholesterol, desmosterol, stigmasterol, lanosterol, lathosterol, diosgenin, sitosterol, zymosterol, zymostenol, 14-demethyl-lanosterol, cholesterol sulfate, DHEA, DHEA sulfate, 14-demethyl-14-dehydrlanosterol, sitostanol, campesterol, ether anionic lipids, ether cationic lipids, lanthanide chelating lipids, A-ring substituted oxysterols, B-ring substituted oxysterols, D-ring substituted oxysterols, side-chain substituted oxysterols, double substituted oxysterols, cholestanoic acid derivatives, fluorinated sterols, fluorescent sterols, sulfonated sterols, phosphorylated sterols, and polyunsaturated sterols of different lengths, saturation states, and their derivatives. In some embodiments, the liposome core comprises, consists essentially of, or consists of 1,2-dioleoyl-sn-glycero-3-phosphocholine (DOPC).

[0176] As disclosed herein, a “lipid” refers to its conventional sense as a generic term encompassing fats, lipids, and alcohol-ether-soluble constituents of protoplasm, which are insoluble in water. Lipids usually consist of a hydrophilic and a hydrophobic moiety. In water, lipids can self-organize to form bilayer membranes, where the hydrophilic moieties (head groups) are oriented towards the aqueous phase, and the lipophilic moieties (acyl chains) are embedded in the hydrophobic region between the two hydrophilic layers comprised within the bilayer. Lipids can also comprise two hydrophilic moieties (bola amphiphiles). In that case, membranes may be formed from a single lipid layer, and not a bilayer. Typical non-limiting examples of lipids are fats, fatty oils, essential oils, waxes, steroids, sterols, phospholipids, glycolipids, sulpholipids, aminolipids, chromolipids, and fatty acids. The term encompasses both naturally occurring and synthetic lipids.

[0177] In some embodiments, the lipids are steroids, sterols (e.g., cholesterol), phospholipids, including phosphatidyl, phosphatidylcholines and phosphatidylethanolamines and sphingomyelins. Where there are fatty acids, they could be about 12-24 carbon chains in length, containing up to 6 double bonds. The fatty acids are linked to a backbone, which may be derived from glycerol. The fatty acids within one lipid can be different (asymmetric), or there may be only 1 type of fatty acid chain present (e.g., lysolecithins). Mixed formulations are also possible, particularly when the non-cationic lipids are derived from natural sources, such as lecithins (phosphatidylcholines) purified from egg yolk, bovine heart, brain, liver or soybean.

[0178] In some embodiments, the SNA includes a neutral lipid. The neutral lipid may be, for example, 1,2-dioleoyl-sn-glycero-3-phosphocholine (DOPC), 1,2-dimyristoyl-sn-phosphatidylcholine (DMPC), 1-palmitoyl-2-oleoyl-sn-phosphatidylcholine (POPC), 1,2-distearoyl-sn-glycero-3-phospho-(1′-rac-glycerol) (DSPG), 1,2-dioleoyl-sn-glycero-3-phospho-(1′-rac-glycerol) (DOPG), 1,2-distearoyl-sn-glycero-3-phosphocholine (DSPC), 1,2-dipalmitoyl-sn-glycero-3-phosphocholine (DPPC), 1,2-di-(9Z-octadecenoyl)-sn-glycero-3-phosphoethanolamine (DOPE), and 1,2-dihexadecanoyl-sn-glycero-3-phosphoethanolamine (DPPE), any related phosphatidylcholine or neutral lipids available from commercial vendors. In some embodiments, the SNA includes 1,2-dioleoyl-sn-glycero-3-phosphocholine (DOPC).

[0179] In some embodiments, the core is a niosome core. A noisome is a vesicle formed from non-ionic surfactant oriented in a bilayer. Niosomes commonly have cholesterol added as an excipient, but other lipid-based and non-lipid-based constituents can also be included. Methods for preparation of niosomes are known in the art. In some embodiments polyethylene glycol (PEG) is included during or following niosome preparation. Niosome vesicles are structurally and functionally analogous to liposomes, but are based on non-ionic surfactant rather than lipid as the primary constituent. Common non-ionic surfactants used include sorbitans (spans) or polysorbates (tween); however, a wide variety of non-ionic surfactants can be used to prepare niosomes.

[0180] As used herein, “conjugated,” “attached,” “linked,” or “directly attached” means two entities stably bound to one another by any physiochemical means. It is important that the nature of the attachment is such that it does not impair substantially the effectiveness of either entity. Keeping these parameters in mind, any covalent or non-covalent linkage known to those of ordinary skill in the art may be employed. In some embodiments, covalent linkage is preferred. Noncovalent conjugation includes hydrophobic interactions, ionic interactions, high affinity interactions such as biotin avidin and biotin streptavidin complexation and other affinity interactions. Such means and methods of attachment are well known to those of ordinary skill in the art.

[0181] In some embodiments, an SNA comprises an oligonucleotide shell. In some embodiments, an oligonucleotide shell includes one or more oligonucleotides (e.g., synthetic oligonucleotides) on the exterior of the core. In some embodiments, the oligonucleotide shell comprises, consists essentially of, or consists of one, two, three, four, five, six, seven, eight, nine, 10, 11, 12, 13, 14, 15, 16, 17, 18, 19, 20, about 25, about 30, about 40, about 50, about 60, about 70, about 80, about 90, about 100, about 150, about 200, about 250, about 300, about 400, about 500, about 600, about 700, about 800, about 900, about 1000, about 1500, about 2000, about 3000, about 4000, about 5000, about 10,000, about 15,000, about 20,000 or more synthetic oligonucleotides, or any range or combination thereof. In some embodiments, the oligonucleotide shell comprises, consists essentially of, or consists of 2-1000, 2-900, 2-800, 2-700, 2-600, 2-500, 2-400, 2-300, 2-200, 2-100, 2-90, 2-80, 2-70, 2-60, 2-50, 2-45, 2-40, 2-35, 2-30, 2-25, 2-20, 2-15 or 2-10 oligonucleotides (e.g., synthetic oligonucleotides). In some embodiments, the oligonucleotide shell comprises, consists essentially of, or consists of 5-100, 10-100, 15-100, 20-100, 25-100, 50-100, 5-50, 10-50, 15-50, 20-50, 25-50, 5-40, 10-40, 15-40, 20-40, 25-40, 5-30, 10-30, 15-30, 20-30, 25-30, 5-25, 10-25, 15-25 or 20-25 oligonucleotides (e.g., synthetic oligonucleotides). In some embodiments, the oligonucleotide shell comprises, consists essentially of, or consists of 30 or about 30 oligonucleotides (e.g., synthetic oligonucleotides).

[0182] In some embodiments, an SNA disclosed herein comprises, consists essentially of, or consists of lipids or lipid molecules and oligonucleotides (e.g., synthetic oligonucleotides) at a molar ratio between 100 to 1 and 10 to 1, between 100 to 1 and 20 to 1, between 100 to 1 and 30 to 1, between 100 to 1 and 40 to 1, between 100 to 1 and 50 to 1, between 100 to 1 and 60 to 1, between 100 to 1 and 70 to 1, between 100 to 1 and 80 to 1, between 100 to 1 and 90 to 1, between 90 to 1 and 10 to 1, between 90 to 1 and 20 to 1, between 90 to 1 and 30 to 1, between 90 to 1 and 40 to 1, between 90 to 1 and 50 to 1, between 90 to 1 and 60 to 1, between 90 to 1 and 70 to 1, between 90 to 1 and 80 to 1, between 80 to 1 and 10 to 1, between 80 to 1 and 20 to 1, between 80 to 1 and 30 to 1, between 80 to 1 and 40 to 1, between 80 to 1 and 50 to 1, between 80 to 1 and 60 to 1, between 80 to 1 and 70 to 1, between 70 to 1 and 10 to 1, between 70 to 1 and 20 to 1, between 70 to 1 and 30 to 1, between 70 to 1 and 40 to 1, between 70 to 1 and 50 to 1, between 70 to 1 and 60 to 1, between 60 to 1 and 10 to 1, between 60 to 1 and 20 to 1, between 60 to 1 and 30 to 1, between 60 to 1 and 40 to 1, between 60 to 1 and 50 to 1, between 50 to 1 and 10 to 1, between 50 to 1 and 20 to 1, between 50 to 1 and 30 to 1, between 50 to 1 and 40 to 1, between 40 to 1 and 10 to 1, between 40 to 1 and 20 to 1, between 40 to 1 and 30 to 1, between 30 to 1 and 10 to 1, between 30 to 1 and 20 to 1 of lipids or lipid molecules to oligonucleotide (e.g., synthetic oligonucleotide), or any range or combination thereof.

[0183] In some embodiments, an SNA disclosed herein comprises lipids or lipid molecules and oligonucleotides (e.g., synthetic oligonucleotides) at a molar ratio of at least or about 10 to 1, 20 to 1, 30 to 1, 40 to 1, 50 to 1, 60 to 1, 70 to 1, 80 to 1, 90 to 1, or 100 to 1 of lipids to oligonucleotide (e.g., synthetic oligonucleotide), or any range or combination thereof. In some embodiments, an SNA disclosed herein comprises lipids or lipid molecules and oligonucleotides (e.g., synthetic oligonucleotides) at a molar ratio of between 55 to 1 and 45 to 1 of lipid or lipid molecules to oligonucleotide. In some embodiments, an SNA disclosed herein comprises lipids or lipid molecules and oligonucleotides (e.g., synthetic oligonucleotides) at a molar ratio of or about 50 to 1 of lipid to oligonucleotide (e.g., synthetic oligonucleotide). In some embodiments, the oligonucleotide portion of the lipids or lipid molecules to oligonucleotide ratio is divided between more than one population of oligonucleotides (e.g., a first population of synthetic oligonucleotides, a second population of synthetic oligonucleotides, etc.).

[0184] In some embodiments, an SNA comprising a first population of synthetic oligonucleotides and a second population of synthetic oligonucleotides may comprise lipids or lipid molecules at a molar ratio of 50 to 0.5 to 0.5 of lipids or lipid molecules to first population of synthetic oligonucleotides to second population of synthetic oligonucleotides. In some embodiments, an SNA comprising a first population of synthetic oligonucleotides and a second population of synthetic oligonucleotides may comprise different amounts of the first population of synthetic oligonucleotides and the second population of synthetic oligonucleotides, such that the molar ratio of lipids or lipid molecules to the first population of synthetic oligonucleotides to the second population of synthetic oligonucleotides is, for example, 50 to 0.1 to 0.9, 50 to 0.2 to 0.8, 50 to 0.3 to 0.7, 50 to 0.4 to 0.6, 50 to 0.6 to 0.4, 50 to 0.7 to 0.3, 50 to 0.8 to 0.2, or 50 to 0.9 to 0.1, or any range or combination thereof, of lipid molecules to first population of synthetic oligonucleotides to second population of synthetic oligonucleotides.

[0185] In some embodiments, the first population of synthetic oligonucleotides comprises one or more first synthetic oligonucleotides disclosed herein complementary to a region of a first KLK gene that is a KLK5 gene and/or first gene product that is a KLK5 gene product. In some embodiments, the second population of synthetic oligonucleotides comprises one or more second synthetic oligonucleotides disclosed herein complementary to or sufficiently complementary to a region of a second KLK gene that is a KLK7 gene and/or second gene product that is a KLK7 gene product.

[0186] In some embodiments, the first population of synthetic oligonucleotides comprises one or more first synthetic oligonucleotides disclosed herein comprising a nucleic acid sequence complementary to or sufficiently complementary to a region of a first KLK gene that is a KLK7 gene and/or first gene product that is a KLK7 gene product. In some embodiments, the second population of synthetic oligonucleotides comprises one or more second synthetic oligonucleotides disclosed herein comprising a nucleic acid sequence complementary to or sufficiently complementary to a region of a second KLK gene that is a KLK5 gene and/or second gene product that is a KLK5 gene product.

[0187] In some embodiments, the oligonucleotides (e.g., synthetic oligonucleotides) are on the exterior surface of the core (e.g., liposome core). In some embodiments, at least one oligonucleotide (e.g., a synthetic oligonucleotide) has its 5′-terminus exposed on the exterior surface away from the core (e.g., the 5′-terminus is located at the end of the oligonucleotide distal from the core). In some embodiments, all of the oligonucleotides (e.g., synthetic oligonucleotides) in an SNA have their 5′-termini exposed on the exterior surface away from the core (e.g., the 5′-termini are located at the ends of the oligonucleotides distal from the core). In some embodiments, at least one oligonucleotide (e.g., a synthetic oligonucleotide) has its 3′-terminus exposed on the exterior surface away from the core (e.g., the 3′-terminus is located at the end of the oligonucleotide distal from the core). In some embodiments, all of the oligonucleotides (e.g., synthetic oligonucleotides) in an SNA have their 3′-termini exposed on the exterior surface away from the core (e.g., the 3′-termini are located at the ends of the oligonucleotides distal from the core). In some embodiments, the SNA does not include an oligonucleotide (e.g., a synthetic oligonucleotide) inside the core (e.g., liposome core).

[0188] In some embodiments, an SNA comprises a first synthetic oligonucleotide and a second synthetic oligonucleotide. In some embodiments, the 5′-terminus of the first synthetic oligonucleotide is exposed on the exterior surface of the SNA away from the core, and the 3′-terminus of the second synthetic oligonucleotide is exposed on the surface of the SNA away from the core. In some embodiments, the 3′-terminus of the first synthetic oligonucleotide is exposed on the exterior surface of the SNA away from the core, and the 5′-terminus of the second synthetic oligonucleotide is exposed on the surface of the SNA away from the core. In some embodiments, the 3′-terminus of the first synthetic oligonucleotide is exposed on the exterior surface of the SNA away from the core, and the 3′-terminus of the second synthetic oligonucleotide is exposed on the surface of the SNA away from the core. In some embodiments, the 5′-terminus of the first synthetic oligonucleotide is exposed on the exterior surface of the SNA away from the core, and the 5′-terminus of the second synthetic oligonucleotide is exposed on the surface of the SNA away from the core.

[0189] In some embodiments, two or more of the oligonucleotides (e.g., synthetic oligonucleotides) in an SNA are crosslinked to one another. In some embodiments, all of the oligonucleotides (e.g., synthetic oligonucleotides) in an SNA are crosslinked to one or more additional oligonucleotides. In some embodiments, the oligonucleotides (e.g., synthetic oligonucleotides) in an SNA are not crosslinked.

[0190] In some embodiments, an SNA disclosed herein has a diameter of, or a population or plurality of SNAs disclosed herein has a mean diameter of about 10 to about 150 nm. In some embodiments, the mean diameter of the population of SNAs is from or about 15 nm to about 100 nm, about 20 nm to about 100 nm, about 25 nm to about 100 nm, about 15 nm to about 50 nm, about 20 nm to about 50 nm, about 10 nm to about 70 nm, about 15 nm to about 70 nm about 20 nm to about 70 nm, about 10 nm to about 30 nm, about 15 nm to about 30 nm, about 20 nm to about 30 nm, about 10 nm to about 40 nm, about 15 nm to about 40 nm, about 20 nm to about 40 nm, about 10 nm to about 80 nm, about 15 nm to about 80 nm, or about 20 nm to about 80 nm.

[0191] In some embodiments, the mean diameter of the population of SNAs is from about 15 nm to about 45 nm. In some embodiments, an SNA disclosed herein has a diameter, or a population of SNAs disclosed herein has a mean diameter of or about 10 nm, about 15 nm, about 20 nm, about 30 nm, about 40 nm, about 50 nm, about 60 nm, about 70 nm, about 80 nm, about 90 nm, or about 100 nm. In some embodiments, an SNA disclosed herein has a diameter, or a population or a plurality of SNAs disclosed herein have a mean diameter of 30 nm or about 30 nm.

[0192] In some embodiments, the core (e.g., liposome core) of an SNA disclosed herein has a diameter of, or the cores (e.g., liposome cores) of a population of SNAs disclosed herein has a mean diameter of about 10 to about 150 nm. In some embodiments, the diameter of the core or the mean diameter of the population of cores is from about 15 nm to about 100 nm, about 20 nm to about 100 nm, about 25 nm to about 100 nm, about 15 nm to about 50 nm, about 20 nm to about 50 nm, about 10 nm to about 70 nm, about 15 nm to about 70 nm, about 20 nm to about 70 nm, about 10 nm to about 30 nm, about 15 nm to about 30 nm, about 20 nm to about 30 nm, about 10 nm to about 40 nm, about 15 nm to about 40 nm, about 20 nm to about 40 nm, about 10 nm to about 80 nm, about 15 nm to about 80 nm, or about 20 nm to about 80 nm. In some embodiments, the core (e.g., liposome core) of an SNA disclosed herein has a diameter of, or the cores (e.g., liposome cores) of a population of SNAs disclosed herein has a mean diameter of about 15 nm to about 45 nm. In some embodiments, the core (e.g., liposome core) of an SNA disclosed herein has a diameter of, or the cores (e.g., liposome cores) of a population of SNAs disclosed herein has a mean diameter of about 10 nm, about 15 nm, about 20 nm, about 30 nm, about 40 nm, about 50 nm, about 60 nm, about 70 nm, about 80 nm, about 90 nm, or about 100 nm. In some embodiments, the core (e.g., liposome core) of an SNA disclosed herein has a diameter of, or the cores (e.g., liposome cores) of a population of SNAs disclosed herein has a mean diameter of about 30 nm.

[0193] In some embodiments, the core (e.g., liposome core) of an SNA disclosed herein has a diameter, or the cores (e.g., liposome cores) of a population of SNAs disclosed herein has a mean diameter of about or less than about 10 nm, 15 nm, 20 nm, 25 nm, 30 nm, 35 nm, and/or 40 nm, or any range or combination thereof. In some embodiments, the core (e.g., liposome core) of an SNA disclosed herein has a diameter, or the cores (e.g., liposome cores) of a population of SNAs disclosed herein has a mean diameter of about or less than 40 nm.

[0194] The SNAs disclosed herein may be stable self-assembling nanostructures. For instance, the SNA may comprise an oligonucleotide (e.g., a synthetic oligonucleotide) of 18-21 nucleosides in length having a sequence disclosed herein, wherein a hydrophobic group at the 3′ or 5′ terminus of the oligonucleotide self-associates to form the core or associates with the core of the nanostructure in water or other suitable solvents. A hydrophobic group as used herein may include cholesterol, a cholesteryl or modified cholesteryl residue, adamantine, dihydrotesterone, long chain alkyl, long chain alkenyl, long chain alkynyl, olely-lithocholic, cholenic, oleoyl-cholenic, palmityl, heptadecyl, myrisityl, bile acids, cholic acid or taurocholic acid, deoxycholate, oleyl litocholic acid, oleoyl cholenic acid, glycolipids, phospholipids, sphingolipids, isoprenoids, such as steroids, vitamins, such as vitamin E, fatty acids either saturated or unsaturated, fatty acid esters, such as triglycerides, pyrenes, porphyrines, Texaphyrine, adamantane, acridines, biotin, coumarin, fluorescein, rhodamine, Texas-Red, digoxygenin, dimethoxytrityl, t-butyldimethylsilyl, t-butyldiphenylsilyl, cyanine dyes (e.g. Cy3 or Cy5), Hoechst 33258 dye, psoralen, or ibuprofen.

[0195] As disclosed herein, a disease or disorder refers to a disease or disorder in a subject. In some embodiments, the disease or disorder is an ichthyosis disease or disorder. In some embodiments, the disease or disorder is associated with or caused by dysregulation of protease activity. In some embodiments, the disease or disorder is associated with or caused by dysregulation of the activity of a kallikrein-related peptidase or kallikrein-related peptidases. In some embodiments, the disease or disorder is associated with or caused by dysregulation of KLK5 protein or activity, KLK7 protein or activity, or KLK5 protein or activity and KLK7 protein or activity. In some embodiments, the disease or disorder is associated with or caused decreased or absent function of a protease inhibitor or protease inhibitors. In some embodiments, the disease or disorder is associated with or caused by decreased or absent function of lympho-epithelial Kazal-type-related inhibitor (LEKTI, sometimes referred to as LEKT1). In some embodiments, the disease or disorder is associated with or caused by a mutation or mutations in a gene encoding LEKTI. In some embodiments, the disease or disorder is associated with or caused by a mutation or mutations in the serine protease inhibitor Kazal-type 5 (SPINK5) gene.

[0196] In some embodiments, the disease or disorder is NS.

[0197] In some embodiments, a “cell” refers to a cell obtained from a subject or existing within a subject. In some embodiments, the cell is a cell which produces peptidases, such as kallikrein-related peptidases. The cell may be a skin cell (e.g., an epithelial cell or a dermal cell, including but not limited to a keratinocyte, such as a granular keratinocyte, a basal cell, a sebaceous gland cell, a sweat gland cell, a dermal root sheath cell, an inner root sheet cell, or an outer root sheath cell), an immune cell (e.g., an innate immune cell or an adaptive immune cell, including but not limited to a neutrophil, a macrophage, a T cell, a B cell, a dendritic cell, or a natural killer cell).

[0198] In some embodiments, the cell is from a subject having a disease or disorder, such as a skin disease or disorder disclosed herein. In some embodiments, the cell is from a subject having an ichthyosis disease or disorder. In some embodiments, the cell is from a subject having NS. In some embodiments, the cell is a keratinocyte.

[0199] In some embodiments, the cell is contacted with an oligonucleotide (e.g., synthetic oligonucleotide), a SNA, or a composition thereof (e.g., pharmaceutical composition thereof) disclosed herein at a concentration of at least 0.001 nM, at least 0.01 nM, at least 0.1 nM, at least 1 nM, at least 10 nM, at least 100 nM, at least 1000 nM, at least 10 μM, at least 100 μM, at least 1000 μM, or above 1000 μM. In some embodiments, the cell is contacted with oligonucleotide (e.g., synthetic oligonucleotide), a SNA, or a composition (e.g., pharmaceutical composition) disclosed herein at a concentration range of 0.001 nM to 0.01 nM, 0.01 nM to 0.1 nM, 0.1 nM to 1 nM, 1 nM to 10 nM, 10 nM to 100 nM, 100 nM to 1000 nM, 1000 nM to 10 μM, 10 μM to 100 μM, or 100 μM to 1000 μM. In some embodiments, the cell is contacted with oligonucleotide (e.g., synthetic oligonucleotide), a SNA, or a composition (e.g., pharmaceutical composition) disclosed herein at a concentration of 0.001 nM, 0.01 nM, 0.1 nM, 1 nM, 10 nM, 100 nM, 1000 nM, 10 μM, 100 μM, 1000 μM or above 1000 μM. In some embodiments, the concentration refers to the total weight or total mass of an oligonucleotide (e.g., synthetic oligonucleotide) disclosed herein in a volume of solution. In a non-limiting example, a concentration of 0.001 nM refers to 0.001 nmoles of oligonucleotide (e.g., synthetic oligonucleotide) per liter of solution (e.g., pharmaceutically acceptable carrier). In some embodiments, the concentration refers to the total weight or total mass of an SNA disclosed herein in a volume of solution. In a non-limiting example, a concentration of 0.001 nM refers to 0.001 nM of SNA per liter of solution (e.g., pharmaceutically acceptable carrier).

[0200] As disclosed herein, to “ameliorate” or “eliminate” a disease or a symptom of a disease refers to decreasing the severity of the disease or the symptom or removing evidence of the disease or the symptom in a subject. In some instances, ameliorating or eliminating a disease or symptom may refer to a change in a metric associated with the disease or symptom as evaluated by a medical professional or as measured by a laboratory test. In some instances, ameliorating or eliminating a disease, disorder or symptom may refer to a change in a metric associated with the disease, disorder or symptom as reported by the subject having the disease or symptom. In some instances, ameliorating or eliminating a disease or symptom may refer to a decrease or elimination of pain associated with the disease, disorder or symptom.

[0201] In some embodiments, an oligonucleotide (e.g., synthetic oligonucleotide), SNA or pharmaceutically acceptable salt thereof disclosed herein is delivered to the epidermis. In some embodiments, an oligonucleotide (e.g., synthetic oligonucleotide), SNA or pharmaceutically acceptable salt thereof is delivered to at least one skin component chosen from the upper stratum granulosum, stratum corneum, hair follicle epithelia and sweat glands.

[0202] As disclosed herein, a “second therapeutic agent” refers to a therapeutic agent other than an oligonucleotide (e.g., synthetic oligonucleotide), SNA or composition disclosed herein. The second therapeutic agent may refer to any composition, compound, or device that is administered to or utilized on a subject having a disease or disorder, which may enhance the therapeutic effect of the synthetic oligonucleotide or SNA disclosed herein.

[0203] In some embodiments, the second therapeutic agent is a topical steroid or two or more topical steroids. In some embodiments, the second therapeutic agent is a topical corticosteroid. In some embodiments, the corticosteroid (e.g., topical corticosteroid) is clobetasol proprionate, betametasone diproprionate, fluocinolone acetonide or hydrocortisone. In some embodiments, the second therapeutic agent is a combination of two or more therapeutic agents. In some embodiments, the second therapeutic agent is a corticosteroid, such as a glucocorticoid-related steroid. In some embodiments, the second therapeutic agent is an anti-fungal agent. In some embodiments, the second therapeutic agent (e.g., steroid or corticosteroid) is administered topically, orally or by injection.

[0204] In some embodiments, the second therapeutic agent is a biological response modifier or biologic, which targets and inhibits an inflammatory cytokine (e.g., tumor necrosis factor-alpha or TNF-alpha) that plays a key role in immune cell recruitment and activation. In some embodiments, the second therapeutic agent is a topical immunomodulator (e.g., tacrolimus, pimecrolimus, etc.).

[0205] In some embodiments, the second therapeutic agent is an antioxidant. In some embodiments, the antioxidant is a synthetic antioxidant. In some embodiments, the antioxidant is a natural or botanically-based antioxidant. In some embodiments, the natural or botanically-based antioxidant is curcumin (e.g., found in turmeric and curry), quercetin (e.g., found in apples), epigallocatechin gallate (e.g., found in green tea), gallic acid, or bisabolol (e.g., found in chamomile). In some embodiments, the antioxidant is resveratrol. In some embodiments, the second therapeutic agent is a vitamin C derivative or a vitamin A derivative. In some embodiments, the natural or botanically-based antioxidant is a small phenolic anti-inflammatory compound found in basil, nutmeg or cheese. In some embodiments, the second therapeutic agent (e.g., natural or botanically-based antioxidant) has a beneficial therapeutic effect in a keratinocyte.

[0206] In some embodiments, the subject is a mammal. In some embodiments, the subject is a primate. In some embodiments, the subject is a human. In some embodiments, the mammal is a vertebrate animal including, but not limited to, a mouse, rat, dog, cat, horse, cow, pig, sheep, goat, turkey, chicken, monkey, fish (e.g., aquaculture species, salmon, etc.). Thus, the disclosure herein can be used to treat diseases or disorders, such as a skin disease, (e.g., chronic skin disease, such as a chronic inflammatory skin disease, an acute skin disease, eczema, rosacea, psoriasis, seborrheic dermatitis, allergic contact dermatitis, an ichthyosis disease, such as NS, etc.) in human or non-human subjects.

[0207] The disclosure herein can be used to treat a skin disease in a human or non-human subject. The disclosure herein can be used to treat a chronic skin disease in a human or non-human subject. The disclosure herein can be used to treat a chronic inflammatory skin disease in a human or non-human subject. The disclosure herein can be used to treat eczema in a human or non-human subject. The disclosure herein can be used to treat rosacea in a human or non-human subject. The disclosure herein can be used to treat psoriasis in a human or non-human subject.

[0208] The disclosure herein can be used to treat seborrheic dermatitis in a human or non-human subject. The disclosure herein can be used to treat allergic contact dermatitis in a human or non-human subject. The disclosure herein can be used to treat ichthyosis disease in a human or non-human subject. The disclosure herein can be used to treat NS in a human or non-human subject.

[0209] In some embodiments, the oligonucleotide (e.g., synthetic oligonucleotide) and/or SNA is administered in a pharmaceutical composition. Routes of administration include but are not limited to cutaneous, subcutaneous, nodal, systemic, intravenous, intrathecal, intracranial, oral, parenteral, intracranial, intramuscular, intranasal, sublingual, intratracheal, inhalation, ocular, vaginal, and rectal.

[0210] In some embodiments, the oligonucleotide (e.g., synthetic oligonucleotide), SNA, or composition thereof (e.g., pharmaceutical composition thereof) is administered topically (e.g., cutaneously).

[0211] As disclosed herein, the dose (e.g., an effective amount) as it relates to administration of an oligonucleotide (e.g., synthetic oligonucleotide) and/or an SNA disclosed herein (e.g., without limitation the phrases “an effective amount of a synthetic oligonucleotide,” “an effective amount of a pharmaceutical composition,” “an effective amount of a spherical nucleic acid”, etc.) refers to the total weight or total mass of active agent (e.g., total weight or total mass of the synthetic oligonucleotides) in the SNA administered to the subject (e.g., subject with a disease or disorder). As disclosed herein, an “effective amount” refers to an amount that is capable of improving one or more symptoms of a disease or disorder or an amount that is capable of improving a metric associated with a disease or disorder.

[0212] In some embodiments, a dose disclosed herein is considered a fixed dose or a discrete dose. In some embodiments, a dose disclosed herein can be adjusted to depend on body weight or be made dependent on body weight. A non-limiting example includes a dose of 2 mg of an oligonucleotide (e.g., synthetic oligonucleotide), an SNA, or a composition thereof (e.g., pharmaceutical composition thereof) disclosed herein, that can also be administered as 2 mg/kg body weight, which depends on kg of body weight. In some embodiments, a dose disclosed herein is independent of body weight. In some embodiments, a dose disclosed herein can be adjusted to depend on body surface area (e.g., total body surface area, skin surface area to be treated, etc.) or be made dependent on body surface area. A non-limiting example includes a dose of 2 mg of an oligonucleotide (e.g., synthetic oligonucleotide), an SNA, or a composition thereof (e.g., pharmaceutical composition thereof) disclosed herein, that can also be administered as 2 mg/m² body surface area, which depends on m² of body surface area (e.g., total body surface area, skin surface area to be treated, etc.). In some embodiments, a dose disclosed herein is independent of body surface area.

[0213] In some embodiments, an oligonucleotide (e.g., synthetic oligonucleotide), an SNA, or a composition thereof (e.g., pharmaceutical composition thereof) disclosed herein is administered once a day, once every three days, once a week, once every two weeks, once every three weeks, once every four weeks, once every five weeks, once every six weeks, once every seven weeks, once every eight weeks, once every nice weeks, once every 10 weeks, once every 12 weeks, once every 18 weeks, once every 24 weeks, once a month, once every two months, once every three months, once every four months, once every five months, once every six months, once every seven months, once every eight months, once every nine months, once every 10 months, once every 11 months, once a year, once every two years, once every three years, once every four years.

[0214] In some embodiments, an oligonucleotide (e.g., synthetic oligonucleotide), a SNA, or a composition thereof (e.g., pharmaceutical composition thereof) disclosed herein is administered to a subject once a week, twice a week or three times per week, for four weeks, six weeks, eight weeks, 10 weeks, 12 weeks, 14 weeks, 16 weeks, 18 weeks, 20 weeks, 24 weeks, one month, two months, three months, four months, five months, six months, seven months, eight months, nine months, 10 months, 11 months, one year, two years, three years, four years, five years, six years.

[0215] In some embodiments an oligonucleotide (e.g., synthetic oligonucleotide), a SNA, or a composition thereof (e.g., pharmaceutical composition thereof) disclosed herein is administered to a subject every three weeks for four weeks, six weeks, eight weeks, 10 weeks, 12 weeks, 14 weeks, 16 weeks, 18 weeks, 20 weeks, 24 weeks, one month, two months, three months, four months, five months, six months, seven months, eight months, nine months, 10 months, 11 months, one year, two years, three years, four years, five years, six years, seven years, eight years, nine years, or 10 years. In some embodiments, the SNA is administered every three weeks. In some embodiments, the SNA is administered about or at least about every four weeks, five weeks, six weeks, 2 months, three months, six months, nine months, one year, 1.5 years, two years, 2.5 years, three years, 3.5 years, four years, 4.5 years, five years, 5.5 years, or six years.

[0216] In some embodiments, the duration of the method for treating a disease or disorder (e.g., NS) with an oligonucleotide (e.g., synthetic oligonucleotide), a SNA, or a composition thereof (e.g., pharmaceutical composition thereof) disclosed herein is for about or at least 3 months, for about or at least six months, for about or at least nine months, for about or at least one year, for about or at least 1.5 years, for about or at least two years, for about or at least 2.5 years, for about or at least 3 years, for about or at least 3.5 years, for about or at least 4 years, for about or at least 4.5 years, for about or at least 5 years, for about or at least 5.5 years, for about or at least 6 years, for about or at least 6.5 years, for about or at least 7 years, for about or at least 7.5 years, for about or at least 8 years, for about or at least 8.5 years, for about or at least 9 years, for about or at least 9.5 years, for about or at least 10 years, for about or at least 15 years, for about or at least 20 years or more than 20 years, or for the lifetime of the subject.

[0217] In some embodiments, an effective amount is from about 0.1 μg to 10,000 mg per dose, at least about 1 μg to 8,000 mg per dose, or 10 μg to 100 μg per dose. In some embodiments the dose administered is about or at least about 1 μgμg, about or at least about 5 μg, about or at least about 10 μg, about or at least about 50 μg, about or at least about 100 μg, about or at least about 200 μg, about or at least about 350 μg, about or at least about 500 μg, about or at least about 1 mg, about or at least about 5 mg, about or at least about 10 mg, about or at least about 50 mg, about or at least about 100 mg, about or at least about 200 mg, about or at least about 350 mg, about or at least about 500 mg, about or at least about 1000 mg or more per dose, and any range or combination thereof. In non-limiting examples of a derivable range from the doses disclosed herein, a range of about 5 mg to about 100 mg, about 5 μg to about 500 mg, etc., can be administered based on the doses disclosed herein.

[0218] Stated in terms of subject body weight, in some embodiments the dose administered is about or at least about 1 μg/kg of body weight, about or at least about 5 μg/kg of body weight, about or at least about 10 μg/kg of body weight, about or at least about 50 μg/kg of body weight, about or at least about 100 μg/kg of body weight, about or at least about 200 μg/kg of body weight, about or at least about 350 μg/kg of body weight, about or at least about 500 μg/kg of body weight, about or at least about 1 mg/kg of body weight, about or at least about 5 mg/kg of body weight, about or at least about 10 mg/kg of body weight, about or at least about 50 mg/kg of body weight, about or at least about 100 mg/kg of body weight, about or at least about 200 mg/kg of body weight, about or at least about 350 mg/kg of body weight, about or at least about 500 mg/kg of body weight, to about or at least about 1000 mg/kg of body weight or more per administration, and any range or combination thereof. In non-limiting examples of a derivable range from the numbers listed herein, a range of about 5 mg/kg of body weight to about 100 mg/kg of body weight, about 5 μg/kg of body weight to about 500 mg/kg of body weight, etc., can be administered, based on the numbers disclosed above.

[0219] The absolute amount (e.g., a discrete dose) will depend upon a variety of factors including the concurrent treatment, the number of doses and the individual patient parameters including age, physical condition, size and weight. These are factors well known to those of ordinary skill in the art and can be addressed with no more than routine experimentation. It is preferred generally that a maximum dose be used, that is, the highest safe dose according to sound medical judgment.

[0220] In some embodiments, an oligonucleotide (e.g., a synthetic oligonucleotide), an SNA, or composition thereof (e.g., pharmaceutical composition thereof) disclosed herein is administered at a dose between 0.1 mg and 10 mg, between 0.2 mg and 10 mg, between 0.3 mg and 10 mg, between 0.4 mg and 10 mg, between 0.5 mg and 10 mg, between 0.6 mg and 10 mg, between 0.7 mg and 10 mg, between 0.8 mg and 10 mg, between 0.9 mg and 10 mg, between 1 mg and 10 mg, between 1 mg and 1,000 mg, between 1 mg and 900 mg, between 1 mg and 800 mg, between 1 mg and 700 mg, between 1 mg and 600 mg, between 1 mg and 500 mg, between 1 mg and 450 mg, between 1 mg and 400 mg, between 1 mg and 350 mg, between 1 mg and 300 mg, between 1 mg and 250 mg, between 1 mg and 200 mg, between 1 mg and 150 mg, between 1 mg and 100 mg, between 1 mg and 90 mg, between 1 mg and 80 mg, between 1 mg and 70 mg, between 1 mg and 60 mg, between 1 mg and 60 mg, between 1 mg and 50 mg, between 1 mg and 49 mg, between 1 mg and 48 mg, between 1 mg and 47 mg, between 1 mg and 46 mg, between 1 mg and 45 mg, between 1 mg and 44 mg, between 1 mg and 43 mg, between 1 mg and 42 mg, between 1 mg and 41 mg, between 1 mg and 40 mg, between 1 mg and 39 mg, between 1 mg and 38 mg, between 1 mg and 37 mg, between 1 mg and 36 mg, between 1 mg and 35 mg, between 1 mg and 34 mg, between 1 mg and 33 mg, between 1 mg and 32 mg, between 1 mg and 31 mg, between 1 mg and 30 mg, between 1 mg and 29 mg, between 1 mg in 28 mg, between 1 mg and 27 mg, between 1 mg and 26 mg, between 1 mg and 25 mg, between 1 mg and 24 mg, between 1 mg and 23 mg, between 1 mg and 22 mg, between 1 mg and 21 mg, between 1 mg and 20 mg, between 1 mg and 19 mg, between 1 mg and 18 mg, between 1 mg and 17 mg, between 1 mg and 16 mg, between 1 mg and 15 mg, between 1 mg and 14 mg, between 1 mg and 13 mg, between 1 mg and 12 mg, between 1 mg and 11 mg, between 1 mg and 10 mg, between 1 mg and 9 mg, between 1 mg and 8 mg, between 1 mg and 7 mg, between 1 mg and 6 mg, between 1 mg and 5 mg, between 1 mg and 4 mg, between 1 mg and 2 mg, between 1 mg and 1.5 mg, between 1 mg and 3 mg, between 3 mg and 5 mg, between 5 mg and 7 mg, between 7 mg and 9 mg, between 9 mg and 14 mg, between 15 mg and 17 mg, between 18 mg and 31 mg, between 31 mg and 33 mg, between 0.5 mg and 2 mg, between 2 mg and 4 mg, between 11 mg and 13 mg, between 23 mg and 25 mg, between 2 mg and 31 mg, between 2 mg and 30 mg, between 2 mg and 29 mg, between 2 mg and 28 mg, between 2 mg and 27 mg, between 2 mg and 26 mg, between 2 mg and 25 mg, between 2 mg and 24 mg, between 2 mg and 23 mg, between 2 mg and 22 mg, between 2 mg and 21 mg, between 2 mg and 20 mg, between 2 mg and 19 mg, between 2 mg and 18 mg, between 2 mg and 17 mg, between 2 mg and 16 mg, between 2 mg and 15 mg, between 2 mg and 14 mg, between 2 mg and 13 mg, between 2 mg and 12 mg, between 2 mg and 11 mg, between 2 mg and 10 mg, between 2 mg and 9 mg, between 2 mg and 8 mg, between 2 mg and 7 mg, between 2 mg and 6 mg, between 2 mg and 5 mg, between 2 mg and 3 mg.

[0221] In some embodiments, an oligonucleotide (e.g., a synthetic oligonucleotide), an SNA, or composition thereof (e.g., pharmaceutical composition thereof) disclosed herein is administered at a dose of or about 0.1 mg, 0.2 mg, 0.3 mg, 0.4 mg, 0.5 mg, 0.6 mg, 0.7 mg, 0.8 mg, 0.9 mg, 1 mg, 1.1 mg, 1.2 mg, 1.3 mg, 1.4 mg, 1.5 mg, 1.6 mg, 1.7 mg, 1.8 mg, 1.9 mg, 2 mg, 2.1 mg, 2.2 mg, 2.3 mg, 2.4 mg, 2.5 mg, 2.6 mg, 2.7 mg, 2.8 mg, 2.9 mg, 3 mg, 3.1 mg, 3.2 mg, 3.3 mg, 3.4 mg, 3.5 mg, 3.6 mg, 3.7 mg, 3.8 mg, 3.9 mg, 4 mg, 4.5 mg, 5 mg, 5.5 mg, 6 mg, 6.5 mg, 7 mg, 7.5 mg, 8 mg, 8.5 mg, 9 mg, 9.5 mg, 10 mg, 10.5 mg, 11 mg, 11.5 mg, 12 mg, 12.5 mg, 30 mg, 13.5 mg, 40 mg, 14.5 mg, 50 mg, 15.5 mg, 60 mg, 16.5 mg, 70 mg, 70.5 mg, 18 mg, 18.5 mg, 19 mg, 19.5 mg, 20 mg, 20.5 mg, 21 mg, 21.5 mg, 22 mg, 22.5 mg, 23 mg, 23.5 mg, 24 mg, 24.5 mg, 25 mg, 25.5 mg, 26 mg, 26.5 mg, 27 mg, 27.5 mg, 28 mg, 28.5 mg, 29 mg, 29.5 mg, 30 mg, 30.5 mg, 31 mg, 31.5 mg, 32 mg, 32.5 mg, 33 mg, 33.5 mg, 34 mg, 34.5 mg, 35 mg, 35.5 mg, 36 mg, 36.5 mg, 37 mg, 37.5 mg, 38 mg, 38.5 mg, 39 mg, 39.5 mg, 40 mg, 41 mg, 42 mg, 43 mg, 44 mg, 45 mg, 46 mg, 47 mg, 48 mg, 49 mg, 50 mg, 51 mg, 52 mg, 53 mg, 54 mg, 55 mg, 56 mg, 57 mg, 58 mg, 59 mg, 60 mg, 65 mg, 70 mg, 75 mg, 80 mg, 85 mg, 90 mg, 95 mg, 100 mg, 110 mg, 120 mg, 120 mg, 130 mg, 140 mg, 150 mg, 160 mg, 170 mg, 180 mg, 190 mg, 200 mg, 210 mg, 220 mg, 230 mg, 240 mg, 250 mg, 260 mg, 270 mg, 280 mg, 290 mg, 300 mg, 50 mg, 400 mg, 450 mg, 500 mg, 550 mg, 600 mg, six and 50 mg, 700 mg, 750 mg, 800 mg, 850 mg, 900 mg, 950 mg, or 1000 mg, or any range or combination thereof.

[0222] In some embodiments, an oligonucleotide (e.g., a synthetic oligonucleotide), an SNA, or composition thereof (e.g., pharmaceutical composition thereof) disclosed herein is administered at a dose of at least or at least about 0.1 mg, 0.2 mg, 0.3 mg, 0.4 mg, 0.5 mg, 0.6 mg, 0.7 mg, 0.8 mg, 0.9 mg, 1 mg, 1.1 mg, 1.2 mg, 1.3 mg, 1.4 mg, 1.5 mg, 1.6 mg, 1.7 mg, 1.8 mg, 1.9 mg, 2 mg, 2.1 mg, 2.2 mg, 2.3 mg, 2.4 mg, 2.5 mg, 2.6 mg, 2.7 mg, 2.8 mg, 2.9 mg, 3 mg, 3.1 mg, 3.2 mg, 3.3 mg, 3.4 mg, 3.5 mg, 3.6 mg, 3.7 mg, 3.8 mg, 3.9 mg, 4 mg, 4.5 mg, 5 mg, 5.5 mg, 6 mg, 6.5 mg, 7 mg, 7.5 mg, 8 mg, 8.5 mg, 9 mg, 9.5 mg, 10 mg, 10.5 mg, 11 mg, 11.5 mg, 12 mg, 12.5 mg, 30 mg, 13.5 mg, 40 mg, 14.5 mg, 50 mg, 15.5 mg, 60 mg, 16.5 mg, 70 mg, 70.5 mg, 18 mg, 18.5 mg, 19 mg, 19.5 mg, 20 mg, 20.5 mg, 21 mg, 21.5 mg, 22 mg, 22.5 mg, 23 mg, 23.5 mg, 24 mg, 24.5 mg, 25 mg, 25.5 mg, 26 mg, 26.5 mg, 27 mg, 27.5 mg, 28 mg, 28.5 mg, 29 mg, 29.5 mg, 30 mg, 30.5 mg, 31 mg, 31.5 mg, 32 mg, 32.5 mg, 33 mg, 33.5 mg, 34 mg, 34.5 mg, 35 mg, 35.5 mg, 36 mg, 36.5 mg, 37 mg, 37.5 mg, 38 mg, 38.5 mg, 39 mg, 39.5 mg, 40 mg, 41 mg, 42 mg, 43 mg, 44 mg, 45 mg, 46 mg, 47 mg, 48 mg, 49 mg, 50 mg, 51 mg, 52 mg, 53 mg, 54 mg, 55 mg, 56 mg, 57 mg, 58 mg, 59 mg, 60 mg, 65 mg, 70 mg, 75 mg, 80 mg, 85 mg, 90 mg, 95 mg, 100 mg, 110 mg, 120 mg, 120 mg, 130 mg, 140 mg, 150 mg, 160 mg, 170 mg, 180 mg, 190 mg, 200 mg, 210 mg, 220 mg, 230 mg, 240 mg, 250 mg, 260 mg, 270 mg, 280 mg, 290 mg, 300 mg, 50 mg, 400 mg, 450 mg, 500 mg, 550 mg, 600 mg, 650 mg, 700 mg, 750 mg, 800 mg, 850 mg, 900 mg, 950 mg, or 1000 mg, or any range or combination thereof.

[0223] In some embodiments, an oligonucleotide (e.g., a synthetic oligonucleotide), an SNA, or composition thereof (e.g., pharmaceutical composition) disclosed herein is administered at a dose greater than or greater than about 0.1 mg, 0.2 mg, 0.3 mg, 0.4 mg, 0.5 mg, 0.6 mg, 0.7 mg, 0.8 mg, 0.9 mg, 1 mg, 1.1 mg, 1.2 mg, 1.3 mg, 1.4 mg, 1.5 mg, 1.6 mg, 1.7 mg, 1.8 mg, 1.9 mg, 2 mg, 2.1 mg, 2.2 mg, 2.3 mg, 2.4 mg, 2.5 mg, 2.6 mg, 2.7 mg, 2.8 mg, 2.9 mg, 3 mg, 3.1 mg, 3.2 mg, 3.3 mg, 3.4 mg, 3.5 mg, 3.6 mg, 3.7 mg, 3.8 mg, 3.9 mg, 4 mg, 4.5 mg, 5 mg, 5.5 mg, 6 mg, 6.5 mg, 7 mg, 7.5 mg, 8 mg, 8.5 mg, 9 mg, 9.5 mg, 10 mg, 10.5 mg, 11 mg, 11.5 mg, 12 mg, 12.5 mg, 30 mg, 13.5 mg, 40 mg, 14.5 mg, 50 mg, 15.5 mg, 60 mg, 16.5 mg, 70 mg, 70.5 mg, 18 mg, 18.5 mg, 19 mg, 19.5 mg, 20 mg, 20.5 mg, 21 mg, 21.5 mg, 22 mg, 22.5 mg, 23 mg, 23.5 mg, 24 mg, 24.5 mg, 25 mg, 25.5 mg, 26 mg, 26.5 mg, 27 mg, 27.5 mg, 28 mg, 28.5 mg, 29 mg, 29.5 mg, 30 mg, 30.5 mg, 31 mg, 31.5 mg, 32 mg, 32.5 mg, 33 mg, 33.5 mg, 34 mg, 34.5 mg, 35 mg, 35.5 mg, 36 mg, 36.5 mg, 37 mg, 37.5 mg, 38 mg, 38.5 mg, 39 mg, 39.5 mg, 40 mg, 41 mg, 42 mg, 43 mg, 44 mg, 45 mg, 46 mg, 47 mg, 48 mg, 49 mg, 50 mg, 51 mg, 52 mg, 53 mg, 54 mg, 55 mg, 56 mg, 57 mg, 58 mg, 59 mg, 60 mg, 65 mg, 70 mg, 75 mg, 80 mg, 85 mg, 90 mg, 95 mg, 100 mg, 110 mg, 120 mg, 130 mg, 140 mg, 150 mg, 160 mg, 170 mg, 180 mg, 190 mg, 200 mg, 210 mg, 220 mg, 230 mg, 240 mg, 250 mg, 260 mg, 270 mg, 280 mg, 290 mg, 300 mg, 50 mg, 400 mg, 450 mg, 500 mg, 550 mg, 600 mg, 650 mg, 700 mg, 750 mg, 800 mg, 850 mg, 900 mg, 950 mg, or 1000 mg, or any range or combination thereof.

[0224] As disclosed herein, a “reference level,” refers to a corresponding level in a subject with a disease or disorder (e.g., a subject with NS) who has been administered a linear oligonucleotide (e.g., a synthetic oligonucleotide disclosed herein) which is not in an SNA format or pharmaceutical composition thereof; to a corresponding level in a subject with a disease or disorder (e.g., NS) who has not been administered an SNA (e.g., an SNA disclosed herein) or pharmaceutical composition thereof; to a corresponding level in a subject with a disease or disorder (e.g., NS) who has not been administered a linear oligonucleotide (e.g., synthetic oligonucleotide) disclosed herein; to a corresponding level in a subject with the disease or disorder (e.g., NS) prior to administration of an oligonucleotide (e.g., synthetic oligonucleotide), SNA or composition thereof (e.g., pharmaceutical composition thereof) disclosed herein to the subject with the disease or disorder (e.g., NS); to a corresponding level in a subject with a disease or disorder (e.g., NS) who has been administered a treatment other than a synthetic oligonucleotide, SNA, or composition thereof (e.g., pharmaceutical composition thereof) disclosed herein; to a corresponding level in a subject without NS; or to a corresponding level in a subject without a disease or disorder, such as an ichthyosis disease or disorder.

[0225] In some embodiments, administration of an oligonucleotide (e.g., synthetic oligonucleotide), an SNA, or a composition thereof (e.g., pharmaceutical composition thereof) to a subject decreases KLK mRNA levels (e.g., KLK5 mRNA levels or KLK7 mRNA levels) or KLK protein levels (e.g., KLK5 protein levels or KLK7 protein levels). In some embodiments, the level is decreased in the subject by at least or about 5%, at least or about 10%, at least or about 15%, at least or about 16%, at least or about 17%, at least or about 18%, at least or about 19%, at least or about 20%, at least or about 21%, at least or about 22%, at least or about 23%, at least or about 24%, at least or about 25%, at least or about 26%, at least or about 27%, at least or about 28%, at least or about 29%, at least or about 30%, at least or about 31%, at least or about 32%, at least or about 33%, at least or about 34%, at least or about 35%, at least or about 36%, at least or about 37%, at least or about 38%, at least or about 39%, at least or about 40%, at least or about 41%, at least or about 42%, at least or about 43%, at least or about 44%, at least or about 45%, at least or about 46%, at least or about 47%, at least or about 48%, at least or about 49%, at least or about 50%, at least or about 55%, at least or about 60%, at least or about 65%, at least or about 70%, at least or about 75%, at least or about 80%, at least or about 85%, at least or about 90%, at least or about 95%, at least or about 96%, at least or about 97%, at least or about 98%, at least or about 99%, or about 100%, or any range or combination thereof, relative to a reference level.

[0226] In some embodiments, the KLK mRNA levels (e.g., KLK5 mRNA levels or KLK7 mRNA levels) or KLK protein levels (e.g., KLK5 protein levels or KLK7 protein levels) are decreased in a cell or cells of a subject with a disease or disorder (e.g., NS). In some embodiments, the KLK mRNA levels (e.g., KLK5 mRNA levels or KLK7 mRNA levels) or KLK protein levels (e.g., KLK5 protein levels or KLK7 protein levels) are decreased in a tissue or tissues of a subject with a disease or disorder (e.g., NS). In some embodiments, the KLK mRNA levels (e.g., KLK5 mRNA levels or KLK7 mRNA levels) or KLK protein levels (e.g., KLK5 protein levels or KLK7 protein levels) are decreased in an organ or organs of a subject with a disease or disorder (e.g., NS). In some embodiments, the KLK mRNA levels (e.g., KLK5 mRNA levels or KLK7 mRNA levels) or KLK protein levels (e.g., KLK5 protein levels or KLK7 protein levels) are decreased in the skin of a subject with a disease or disorder (e.g., NS).

[0227] In some embodiments, an oligonucleotide (e.g., synthetic oligonucleotide), a SNA, or a composition thereof (e.g., pharmaceutical composition thereof) is contacted with a cell to decrease KLK mRNA levels (e.g., KLK5 mRNA levels or KLK7 mRNA levels) or KLK protein levels (e.g., KLK5 protein levels or KLK7 protein levels) in the cell. In some embodiments, the level in the cell is decreased by at least or about 5%, at least or about 10%, at least or about 15%, at least or about 16%, at least or about 17%, at least or about 18%, at least or about 19%, at least or about 20%, at least or about 21%, at least or about 22%, at least or about 23%, at least or about 24%, at least or about 25%, at least or about 26%, at least or about 27%, at least or about 28%, at least or about 29%, at least or about 30%, at least or about 31%, at least or about 32%, at least or about 33%, at least or about 34%, at least or about 35%, at least or about 36%, at least or about 370, at least or about 38%, at least or about 39%, at least or about 40%, at least or about 41%, at least or about 42%, at least or about 43%, at least or about 44%, at least or about 45%, at least or about 46%, at least or about 47%, at least or about 48%, at least or about 49%, at least or about 50%, at least or about 55%, at least or about 60%, at least or about 65%, at least or about 70%, at least or about 75%, at least or about 80%, at least or about 85%, at least or about 90%/6, at least or about 95%, at least or about 96%, at least or about 97%, at least or about 98%, at least or about 99%, or about 100% relative to a reference level.

[0228] In some embodiments, an oligonucleotide (e.g., synthetic oligonucleotide), a SNA, or a composition thereof (e.g., pharmaceutical composition thereof) is administered to a subject at a dose which results in one or more of decreased KLK mRNA expression, decreased KLK mRNA translation, and/or decreased KLK protein expression (e.g., decreased KLK5 or KLK7 mRNA expression, decreased KLK5 or KLK7 pre-mRNA expression, decreased KLK5 or KLK7 mRNA translation, and/or decreased KLK5 or KLK7 protein expression) by at least or about 5%, at least or about 10%, at least or about 15%, at least or about 16%, at least or about 17%, at least or about 18%, at least or about 19%, at least or about 20%, at least or about 21%, at least or about 22%, at least or about 23%, at least or about 24%, at least or about 25%, at least or about 26%, at least or about 27%, at least or about 28%, at least or about 29%, at least or about 30%, at least or about 31%, at least or about 32%, at least or about 33%, at least or about 34%, at least or about 35%, at least or about 36%, at least or about 37%, at least or about 38%, at least or about 39%, at least or about 40%, at least or about 41%, at least or about 42%, at least or about 43%, at least or about 44%, at least or about 45%, at least or about 46%, at least or about 47%, at least or about 48%, at least or about 49%, at least or about 50%, at least or about 55%, at least or about 60%, at least or about 65%, at least or about 70%, at least or about 75%, at least or about 80%, at least or about 85%, at least or about 90%, at least or about 95%, at least or about 96%, at least or about 97%, at least or about 98%, at least or about 99%, or about 100% relative to a reference level.

[0229] In some embodiments, the KLK mRNA expression (e.g., KLK5 and/or KLK7 mRNA expression), KLK pre-mRNA expression (e.g., KLK5 and/or KLK7 pre-mRNA expression), KLK mRNA translation (e.g., KLK5 and/or KLK7 mRNA translation), and/or KLK protein expression (e.g., KLK5 and/or KLK7 protein expression) are decreased in a cell or cells of a subject. In some embodiments, the KLK mRNA expression (e.g., KLK5 and/or KLK7 mRNA expression), KLK pre-mRNA expression (e.g., KLK5 and/or KLK7 pre-mRNA expression), KLK mRNA translation (e.g., KLK5 and/or KLK7 mRNA translation), and/or KLK protein expression (e.g., KLK5 and/or KLK7 protein expression) are decreased in a tissue or tissues of a subject. In some embodiments, the KLK mRNA expression (e.g., KLK5 and/or KLK7 mRNA expression), KLK pre-mRNA expression (e.g., KLK5 and/or KLK7 pre-mRNA expression), KLK mRNA translation (e.g., KLK5 and/or KLK7 mRNA translation), and/or KLK protein expression (e.g., KLK5 and/or KLK7 protein expression) are decreased in the skin of a subject. In some embodiments, the KLK mRNA expression (e.g., KLK5 and/or KLK7 mRNA expression), KLK pre-mRNA expression (e.g., KLK5 and/or KLK7 pre-mRNA expression), KLK mRNA translation (e.g., KLK5 and/or KLK7 mRNA translation), and/or KLK protein expression (e.g., KLK5 and/or KLK7 protein expression) are decreased in an organ or organs of a subject (e.g., subject with NS).

[0230] As disclosed herein, “measuring kallikrein-related peptidase (KLK) mRNA levels” or “measuring kallikrein-related peptidase (KLK) protein levels” refers to quantifying or qualitatively evaluating the amount of KLK mRNA (e.g., KLK5 and/or KLK7 mRNA) or KLK protein (e.g., KLK5 and/or KLK7 protein) in a given sample. In some embodiments, measuring KLK mRNA levels (e.g., KLK5 and/or KLK7 mRNA levels) may refer to using laboratory methods known to those of ordinary skill in the art to quantify or qualitatively evaluate the amount of KLK mRNA (e.g., KLK5 and/or KLK7 mRNA) in a given sample, using methods including but not limited to quantitative real-time reverse transcription polymerase chain reaction (qRT-PCR), Northern blotting, in situ hybridization, or spectrophotometric analysis. In some embodiments, measuring KLK protein levels (e.g., KLK5 and/or KLK7 protein levels) may refer to using laboratory methods known to those of ordinary skill in the art to quantify or qualitatively evaluate the amount of KLK protein (e.g., KLK5 and/or KLK7 protein) in a given sample, using methods including but not limited to Western blotting, enzyme-linked immunosorbent assays (ELISA), immunohistochemical staining, immunofluorescent staining, mass spectrometry, spectrophotometric analysis, or colorimetric analysis such as bicinchoninic acid (BCA) assays.

[0231] As disclosed herein, “a value that is less than” and equivalent phrases refer to values which are decreased or quantified to be smaller than a value or values to which they are compared.

[0232] As disclosed herein, “pharmaceutically acceptable salts” are physiologically and pharmaceutically acceptable salts of the nucleic acids (e.g., salts that retain the desired biological activity of the compound of interest and do not impart undesired toxicological effects thereto). Pharmaceutically acceptable salts include but are not limited to (a) salts formed with cations such as sodium, potassium, ammonium, magnesium, calcium, polyamines such as spermine and spermidine, etc.; (b) acid addition salts formed with inorganic acids, for example hydrochloric acid, hydrobromic acid, sulfuric acid, phosphoric acid, nitric acid and the like; (c) salts formed with organic acids such as, for example, acetic acid, oxalic acid, tartaric acid, succinic acid, maleic acid, fumaric acid, gluconic acid, citric acid, malic acid, ascorbic acid, benzoic acid, tannic acid, palmitic acid, alginic acid, polyglutamic acid, naphthalenesulfonic acid, methanesulfonic acid, p-toluenesulfonic acid, naphthalenedisulfonic acid, polygalacturonic acid, and the like; and (d) salts formed from elemental anions such as chlorine, bromine, and iodine. Pharmaceutical compositions of the present disclosure comprise an effective amount of one or more agents, dissolved or dispersed in a pharmaceutically acceptable carrier.

[0233] Pharmaceutically acceptable salts, include the acid addition salts, e.g., those formed with the free amino groups of a proteinaceous composition, or which are formed with inorganic acids such as for example, hydrochloric or phosphoric acids, or such organic acids as acetic, oxalic, tartaric or mandelic acid. Salts formed with the free carboxyl groups also can be derived from inorganic bases such as for example, sodium, potassium, ammonium, calcium or ferric hydroxides; or such organic bases as isopropylamine, trimethylamine, histidine or procaine.

[0234] In embodiments where the composition is in a liquid form, a carrier can be a solvent or dispersion medium comprising but not limited to, water, ethanol, polyol (e.g., glycerol, propylene glycol, liquid polyethylene glycol, etc.), lipids (e.g., triglycerides, vegetable oils, liposomes) and combinations thereof. The proper fluidity can be maintained, for example, by the use of a coating, such as lecithin; by the maintenance of the required particle size by dispersion in carriers such as, for example liquid polyol or lipids; by the use of surfactants such as, for example hydroxypropylcellulose; or combinations thereof such methods. In many cases, it will be preferable to include isotonic agents, such as, for example, sugars, sodium chloride or combinations thereof.

[0235] In some embodiments, a “pharmaceutical or pharmacologically acceptable” composition refers to molecular entities and compositions that do not produce an adverse, allergic or other untoward reaction when administered to an animal, such as, for example, a human, as appropriate. Moreover, for animal (e.g., human) administration, it will be understood that preparations should meet sterility, pyrogenicity, general safety and purity standards as required by FDA Office of Biological Standards. The compounds are generally suitable for administration to humans. This term requires that a compound or composition be nontoxic and sufficiently pure so that no further manipulation of the compound or composition is needed prior to administration to humans.

[0236] In certain embodiments, pharmaceutical compositions may comprise, for example, at least about 0.000001% (w/w) of an active agent (e.g., an oligonucleotide, such as a synthetic oligonucleotide, or an SNA disclosed herein). In other embodiments, the active compound may comprise between about 2% to about 75% of the weight of the unit (w/w), or between about 25% to about 60%, for example, and any range or combination thereof. In some embodiments, the active agent (e.g., an oligonucleotide, such as a synthetic oligonucleotide, or an SNA disclosed herein) disclosed herein comprises between 0.000001% and 0.00001%, between 0.00001% and 0.00010%, between 0.0001% and 0.0010%, between 0.001% and 0.010%, between 0.01% and 0.1%, between 0.1% and 1%, between 1% and 5%, between 5% and 10%, between 10% and 15%, between 15% and 20%, between 20% and 25%, between 25% and 30%, between 30% and 40%, between 40% and 50% (w/w), and any range or combination thereof. In some embodiments, the active agent (e.g., oligonucleotide, such as a synthetic oligonucleotide or an SNA disclosed herein) comprises 0.00007%, 0.007%, 0.01%, 0.1%, 1% (w/w).

[0237] As used herein, “pharmaceutically acceptable carrier” includes any and all solvents, dispersion media, coatings, surfactants, antioxidants, preservatives (e.g., antibacterial agents, antifungal agents), isotonic agents, absorption delaying agents, salts, preservatives, drugs, drug stabilizers, gels, binders, excipients, disintegration agents, lubricants, sweetening agents, flavoring agents, dyes, such like materials and combinations thereof, as would be known to one of ordinary skill in the art. The agent may comprise different types of carriers depending on whether it is to be administered in solid, liquid, gel, cream, or aerosol form, and whether it need to be sterile for such routes of administration as injection.

[0238] An oligonucleotide (e.g., synthetic oligonucleotide), SNA, or compositions thereof (e.g., pharmaceutical composition thereof) disclosed herein can be administered intravenously, intradermally, intraarterially, intralesionally, intratumorally, intracranially, intrathecally, intraarticularly, intraprostatically, intrapleurally, intratracheally, intranasally, intravitreally, intravaginally, intrarectally, topically, intramuscularly, intraperitoneally, subcutaneously, subconjunctival, intravascularly, mucosally, intrapericardially, intraumbilically, intraocularly, via eyedrops, orally, topically (e.g., cutaneously), locally, via inhalation (e.g., aerosol inhalation), via injection, via infusion, via continuous infusion, via localized perfusion bathing target cells directly, via a catheter, or via a lavage. In some embodiments, an oligonucleotide (e.g., synthetic oligonucleotide), SNA, or compositions thereof (e.g., pharmaceutical composition thereof) disclosed herein can be administered intradermally.

[0239] In some embodiments, an oligonucleotide (e.g., synthetic oligonucleotide), SNA, or compositions thereof (e.g., pharmaceutical composition thereof) disclosed herein can be administered in creams, in gels, in lipid compositions (e.g., liposomes), or by other method or any combination of the forgoing as would be known to one of ordinary skill in the art.

[0240] In some embodiments, an oligonucleotide (e.g., synthetic oligonucleotide), an SNA, or compositions thereof (e.g., pharmaceutical composition thereof) disclosed herein is administered topically (e.g., cutaneously).

[0241] In any case, the composition may comprise various antioxidants to retard oxidation of one or more components. Additionally, the prevention of the action of microorganisms can be brought about by preservatives such as various antibacterial and antifungal agents, including but not limited to parabens (e.g., methylparabens, propylparabens), chlorobutanol, phenol, sorbic acid, thimerosal or combinations thereof.

[0242] The agent, which may be an oligonucleotide (e.g., synthetic oligonucleotide), SNA, or compositions thereof (e.g., pharmaceutical composition thereof) as disclosed, may be formulated into a composition in a free base, neutral or salt form.

[0243] An oligonucleotide (e.g., synthetic oligonucleotide), SNA, or compositions thereof (e.g., pharmaceutical composition thereof) disclosed herein may be administered directly to a tissue. Direct tissue administration may be achieved by direct injection, topical application, or local application. The compounds may be administered once, or alternatively they may be administered in a plurality of administrations. If administered multiple times, the compounds may be administered via different routes. For example, the first (or the first few) administrations may be made directly into the affected tissue while later administrations may be systemic.

[0244] The formulations are administered in pharmaceutically acceptable compositions, which may routinely contain pharmaceutically acceptable concentrations of salt, buffering agents, preservatives, compatible carriers, adjuvants, excipients, and optionally other therapeutic ingredients. A composition disclosed herein (e.g., synthetic oligonucleotide, SNA, etc.) may be administered in a pharmaceutical composition. In general, a pharmaceutical composition comprises the composition and a pharmaceutically-acceptable carrier. As used herein, a pharmaceutically-acceptable carrier means a non-toxic material that does not interfere with the effectiveness of the biological activity of the active ingredients. Pharmaceutically acceptable carriers include, without limitation, diluents, fillers, salts, buffers, stabilizers, solubilizers and other materials which are well-known in the art. Such preparations may routinely contain salt, buffering agents, preservatives, compatible carriers, and optionally other therapeutic agents. When used in medicine, the salts should be pharmaceutically acceptable, but non-pharmaceutically acceptable salts may conveniently be used to prepare pharmaceutically-acceptable salts thereof and are not excluded from the scope of the disclosure. Such pharmacologically and pharmaceutically-acceptable salts include, but are not limited to, those prepared from the following acids: hydrochloric, hydrobromic, sulfuric, nitric, phosphoric, maleic, acetic, salicylic, citric, formic, malonic, succinic, and the like. Also, pharmaceutically-acceptable salts can be prepared as alkaline metal or alkaline earth salts, such as sodium, potassium or calcium salts.

[0245] A composition disclosed herein (e.g., oligonucleotide, synthetic oligonucleotide, SNA, etc.) may be formulated into preparations in solid, semi-solid, liquid or gaseous forms such as tablets, capsules, powders, granules, ointments, solutions, depositories, inhalants and injections, and usual ways for oral, parenteral or surgical administration. The disclosure also embraces pharmaceutical compositions which are formulated for local administration, such as by implants.

[0246] A composition disclosed herein (e.g., synthetic oligonucleotide, SNA, etc.), when it is desirable to deliver them systemically, may be formulated for parenteral administration by injection, e.g., by bolus injection or continuous infusion. Formulations for injection may be presented in unit dosage form, e.g., in ampoules or in multi-dose containers, with an added preservative. The compositions may take such forms as suspensions, solutions or emulsions in oily or aqueous vehicles, and may contain formulatory agents such as suspending, stabilizing and/or dispersing agents.

[0247] Preparations for parenteral administration include sterile aqueous or non-aqueous solutions, suspensions, and emulsions. Examples of non-aqueous solvents are propylene glycol, polyethylene glycol, vegetable oils such as olive oil, and injectable organic esters such as ethyl oleate. Aqueous carriers include water, alcoholic/aqueous solutions, emulsions or suspensions, including saline and buffered media. Parenteral vehicles include sodium chloride solution, Ringer's dextrose, dextrose and sodium chloride, lactated Ringer's, or fixed oils. Intravenous vehicles include fluid and nutrient replenishers, electrolyte replenishers (such as those based on Ringer's dextrose), and the like. Preservatives and other additives may also be present such as, for example, antimicrobials, anti-oxidants, chelating agents, and inert gases and the like. Lower doses will result from other forms of administration, such as intravenous administration. In the event that a response in a subject is insufficient at the initial doses applied, higher doses (or effectively higher doses by a different, more localized delivery route) may be employed to the extent that patient tolerance permits. Multiple doses per day are contemplated to achieve appropriate systemic levels of compounds.

[0248] In some embodiments, a delivery vehicle is a biocompatible microparticle or implant that is suitable for implantation into the mammalian recipient. Other delivery systems can include time-release, delayed release or sustained release delivery systems. Such systems can avoid repeated administrations of the compound, increasing convenience to the subject and the physician. Many types of release delivery systems are available and known to those of ordinary skill in the art. They include polymer base systems such as poly(lactide-glycolide), copolyoxalates, polycaprolactones, polyesteramides, polyorthoesters, polyhydroxybutyric acid, and polyanhydrides.

[0249] This invention is not limited in its application to the details of construction and the arrangement of components set forth in the following description. The invention is capable of other embodiments and of being practiced or of being carried out in various ways. Also, the phraseology and terminology used herein is for the purpose of description and should not be regarded as limiting. The use of “including,” “comprising,” or “having,” “containing,” “involving,” and variations thereof herein, is meant to encompass the items listed thereafter and equivalents thereof as well as additional items.

[0250] Those skilled in the art will recognize, or be able to ascertain using no more than routine experimentation, many equivalents to the specific embodiments of the invention disclosed herein. Such equivalents are intended to be encompassed by the following claims.

[0251] All references, including patent documents, disclosed herein are incorporated by reference in their entirety.

### EXAMPLES

### Example 1. Nucleic Acid (not in Spherical Nucleic Acid (SNA) Format) Compounds Targeted to Human KLK5 Gene

[0252] About nineteen hundred newly designed nucleic acid compounds (not in SNA format) comprising antisense oligonucleotides targeting the human KLK5 gene sequence were tested for their effect on human KLK5 mRNA in vitro in A431 cells. Table 1 lists the approximately fifteen hundred gapmer antisense oligonucleotides and approximately four hundred fully 2′-O-methyl modified antisense oligonucleotides that were used. All of the approximately nineteen hundred antisense oligonucleotides also contained two internal spacer 18 (iSp18) modifications and a terminal cholesterol-TEG moiety (3CholTEG).

[0253] A431 cells were plated into 96-well tissue culture plates at a density of 15,000 cells per well. Lipidated nucleic acid compounds (not in SNA format) were diluted in PBS to give a final concentration of 20 μM. Prior to treatment, cell culture media was replaced with 90 μL of fresh media and 10 μL of compound was added to each well to yield a final treatment concentration of 2 μM. Appropriate controls, including transfected siRNAs and nonsense control lipidated nucleic acid compounds (not in SNA format), were also added to each treatment plate. After a treatment period of approximately 48 hours, RNA was isolated from the cells and KLK5 mRNA levels were measured by quantitative reverse-transcriptase polymerase chain reaction (qRT-PCR). Relative KLK5 expression in each sample was calculated using the 2^{-ΔΔCt} method.

[0254] The results are shown in Table 1 in the “% inhib.” columns. Approximately seventy-two compounds with greater than 30% inhibition were identified. The best-performing compounds are shown in Table 3.

### Example 2. Nucleic Acid (not in SNA Format) Compounds Targeted to Human KLK7Gene

[0255] About twenty-two hundred newly designed nucleic acid (not in SNA format) compounds comprising antisense oligonucleotides targeting the human KLK7 gene sequence were tested for their effect on human KLK7 mRNA in vitro in A431 cells. Table 2 lists the approximately nineteen hundred gapmer antisense oligonucleotides and approximately three hundred fully 2′-O-methyl modified antisense oligonucleotides that were used. All of the approximately twenty-two hundred antisense oligonucleotides also contained two internal spacer 18 (iSp18) modifications and a terminal cholesterol-TEG moiety (3CholTEG).

[0256] A431 cells were plated into 96-well tissue culture plates at a density of 15,000 cells per well. Lipidated nucleic acid compounds (not in SNA format) were diluted in PBS to give a final concentration of 20 μM. Prior to treatment, cell culture media was replaced with 90 μL of fresh media and 10 μL of compound was added to each well to yield a final treatment concentration of 2 μM. Appropriate controls, including transfected siRNAs and nonsense control lipidated nucleic acid compounds (not in SNA format), were also added to each treatment plate. After a treatment period of approximately 48 hours, RNA was isolated from the cells and KLK7 mRNA levels were measured by quantitative reverse-transcriptase polymerase chain reaction (qRT-PCR). Relative KLK7 expression in each sample was calculated using the 2^{-ΔΔCt} method.

[0257] The results are shown in Table 2 under “% inhibition” column. Approximately forty-two compounds with greater than 30% inhibition were identified. The best-performing compounds are shown in Table 4.

### Example 3. Spherical Nucleic Acid (SNA) Compounds Targeted to Human KLK5 and KLK7

[0258] Newly designed SNA compounds and lipidated nucleic acid compounds comprising antisense oligonucleotides targeting the human KLK5 and KLK7 gene sequences were tested for their effect on human KLK5 and KLK7 mRNA in vitro in A431 and HaCaT cells. Each of the antisense oligonucleotides contained various modifications, including base modifications, sugar modifications, and internucleoside linkage modifications. Each nucleic oligonucleotide also comprised a cholesterol-TEG or tocopherol lipid moiety at its 5′- or 3′-end. To formulate SNAs comprising the oligonucleotides, liposomes were first prepared from dried DOPC (1,2-dioleoyl-sn-glycero-3-phosphocholine), rehydrated in PBS by agitating overnight, and homogenized under pressure until a mean diameter of 18-20 nm and a polydispersity index of <0.2 were reached. SNAs were then formed under sterile conditions by mixing the lipidated oligonucleotides with liposomes at a 50 to 1 w/w ratio of lipid to oligonucleotide.

[0259] To test the effects of SNAs and lipidated nucleic acid compounds on KLK5 and KLK7 gene expression, A431 and HaCaT cells were treated and mRNA was quantified by quantitative reverse transcription polymerase chain reaction (qRT-PCR). A431 cells were cultured using protocols developed by ATCC. HaCaT cells were cultured similarly. Cells were plated into 96-well tissue culture plates at a density of 15K cells per well at 16 hours prior to treatment. SNAs and lipidated compounds were diluted in PBS to give a final concentration of 20 μM. Prior to treatment cell culture media was replaced with 90 μL of fresh media and 10 μL of compound was added to each well to give a final treatment concentration of 2 μM. Appropriate controls including transfected siRNAs and nonsense control SNAs were also added to each treatment plate.

[0260] Cells were lysed 48-hours post-treatment using the Cells-to-Ct method according to manufacturer instructions. Lysates were immediately frozen at −80° C. and stored for at least 16 hours before processing. qRT-PCR was performed using TaqMan assays set up as follows: 2 μl of cell lysate plus 8 μl of qRT-PCR Master Mix multiplexed with FAM-labeled KLK5 and KLK7 probes and custom VIC-labeled GAPDH probes. Table 23 lists the probes used for qRT-PCR analysis. Technical duplicates for each treatment were run on a QuantStudio 12K PCR system using manufacturer-recommended thermocycler settings. KLK cycle threshold (Ct) values were first normalized to GAPDH expression by calculating the ΔCt values. Changes in KLK mRNA expression were then determined by normalizing each treatment group to either the median gene expression across the plate or the average of untreated wells using the 2^{-ΔΔCt} method.

TABLE 23
Probes used for gene expression measurement assays.

| | | Gene Expression ID | | |
|---|---|---|---|---|
| Target | Manufacturer | (ThermoFisher) | 5′DYE | 3′Quencher |
| KLK5 | ThermoFisher Scientific | Hs01548152_g1 | FAM | MGB |
| KLK5 | ThermoFisher Scientific | Hs01548153_m1 | FAM | MGB |
| KLK7 | ThermoFisher Scientific | Hs01012732_g1 | FAM | MGB |
| KLK7 | ThermoFisher Scientific | Hs00192503_m1 | FAM | MGB |
| GAPDH | Custom | — | VIC | QSY |

| Name | Sequence (5′-3′) |
|---|---|
| GAPDH-FWD | CAAGGTCATCCATGACAACTTTG (SEQ ID NO: 7848) |
| GAPDH-REV | GGGCCATCCACAGTCTTCT (SEQ ID NO: 7808) |
| GAPDH-Probe | VIC-ACCACAGTCCATGCCATCACTGCCA-QSY (SEQ ID NO: 7849) |

[0261] Tables 5-22 show sequence information and results of gene expression analysis. Table 5 lists 2′-O-methyl modified lipidated nucleic acid compounds targeted to KLK5 and shows the effects of the lipidated nucleic acid compound treatment on KLK5 gene expression in A431 cells.

[0262] The compounds listed in Table 5 can also be used in SNA format, by preparing SNAs as described above. Tables 7, 8, 10 list SNA compounds comprising oligonucleotides targeted to KLK5 and show the effects of the SNA treatment on KLK5 gene expression in A431 cells. Tables 6, 9 and 11 list SNA compounds comprising oligonucleotides targeted to KLK7 and show the effects of the SNA treatment on KLK7 gene expression in A431 cells.

[0263] Table 12 lists bispecific SNA compounds comprising two populations of oligonucleotides, a first targeted to KLK5 and a second targeted to KLK7. Table 13 lists alternate bispecific SNA compounds, and shows the effects of those SNAs on KLK5 and KLK7 gene expression in A431 cells. Table 14 lists two preferred bispecific SNA compounds and shows the effects of those SNAs on KLK5 and KLK7 gene expression in A431 cells. Tables 15 and 17 show KLK5 gene expression results measured in A431 cells following treatment with bispecific SNAs. Table 16 shows average KLK5 gene expression and 1C50 values for the inhibition of KLK5 gene expression by bispecific SNAs listed in Table 15. Table 18 shows KLK5 gene expression results measured in HaCaT cells following treatment with bispecific SNAs.

[0264] Tables 19 and 21 show KLK7 gene expression results measured in A431 cells following treatment with bispecific SNAs. Table 20 shows average KLK7 gene expression and IC50 values for the inhibition of KLK7 gene expression by bispecific SNAs listed in Table 19. Table 22 shows KLK7 gene expression results measured in HaCaT cells following treatment with bispecific SNAs.

### Other Embodiments

[0265] Embodiment 1. A synthetic oligonucleotide comprising a nucleic acid sequence complementary to or sufficiently complementary to a region of a kallikrein-related peptidase 5 (KLK5) gene and/or to a region of a KLK5 gene product, wherein the synthetic oligonucleotide comprises, consists essentially of, or consists of mCmUmGmAmGC*C*A*C*C*C*T*C*A*C*mCmAmGmGmU/iSp18//iSp18//3CholTEG/ (SEQ ID NO: 99), or a pharmaceutically acceptable salt thereof.

[0266] Embodiment 2. A synthetic oligonucleotide comprising a nucleic acid sequence complementary to or sufficiently complementary to a region of a kallikrein-related peptidase 5 (KLK5) gene and/or to a region of a KLK5 gene product, wherein the synthetic oligonucleotide comprises, consists essentially of, or consists of mUmCmCmCmUG*C*C*T*G*C*T*G*A*G*mCmCmAmCmC/iSp18//iSp18//3CholTEG/ (SEQ ID NO: 109), or a pharmaceutically acceptable salt thereof.

[0267] Embodiment 3. A synthetic oligonucleotide comprising a nucleic acid sequence complementary to or sufficiently complementary to a region of a kallikrein-related peptidase 5 (KLK5) gene and/or to a region of a KLK5 gene product, wherein the synthetic oligonucleotide comprises, consists essentially of, or consists of mCmCmUmUmCC*C*T*G*C*C*T*G*C*T*mGmAmGmCmC/iSp18//iSp18//3ChoTEG/ (SEQ ID NO: 112), or a pharmaceutically acceptable salt thereof.

[0268] Embodiment 4. A synthetic oligonucleotide comprising a nucleic acid sequence complementary to or sufficiently complementary to a region of a kallikrein-related peptidase 5 (KLK5) gene and/or to a region of a KLK5 gene product, wherein the synthetic oligonucleotide comprises, consists essentially of, or consists of mUmCmCmUmUC*C*C*T*G*C*C*T*G*C*mUmGmAmGmC/iSp18//iSp18//3CholTEG/ (SEQ ID NO: 113), or a pharmaceutically acceptable salt thereof.

[0269] Embodiment 5. A synthetic oligonucleotide comprising a nucleic acid sequence complementary to or sufficiently complementary to a region of a kallikrein-related peptidase 5 (KLK5) gene and/or to a region of a KLK5 gene product, wherein the synthetic oligonucleotide comprises, consists essentially of, or consists of mCmUmCmCmUT*C*C*C*T*G*C*C*T*G*mCmUmGmAmG/iSp18//iSp18//3CholTEG/ (SEQ ID NO: 114), or a pharmaceutically acceptable salt thereof.

[0270] Embodiment 6. A synthetic oligonucleotide comprising a nucleic acid sequence complementary to or sufficiently complementary to a region of a kallikrein-related peptidase 5 (KLK5) gene and/or to a region of a KLK5 gene product, wherein the synthetic oligonucleotide comprises, consists essentially of, or consists of mCmCmCmAmCA*T*C*C*A*G*G*G*G*G*mGmUmCmUmU/iSp18//iSp18//3CholTEG/ (SEQ ID NO: 315), or a pharmaceutically acceptable salt thereof.

[0271] Embodiment 7. A synthetic oligonucleotide comprising a nucleic acid sequence complementary to or sufficiently complementary to a region of a kallikrein-related peptidase 5 (KLK5) gene and/or to a region of a KLK5 gene product, wherein the synthetic oligonucleotide comprises, consists essentially of, or consists of mUmUmAmGmAG*G*G*G*T*G*G*T*C*A*mCmAmGmGmA/iSp18//iSp18//3CholTEG/ (SEQ ID NO: 403), or a pharmaceutically acceptable salt thereof.

[0272] Embodiment 8. A synthetic oligonucleotide comprising a nucleic acid sequence complementary to or sufficiently complementary to a region of a kallikrein-related peptidase 5 (KLK5) gene and/or to a region of a KLK5 gene product, wherein the synthetic oligonucleotide comprises, consists essentially of, or consists of mCmAmGmGmUC*C*T*G*G*T*T*G*C*T*mCmCmCmAmG/iSp18//iSp18//3CholTEG/ (SEQ ID NO: 434), or a pharmaceutically acceptable salt thereof.

[0273] Embodiment 9. A synthetic oligonucleotide comprising a nucleic acid sequence complementary to or sufficiently complementary to a region of a kallikrein-related peptidase 5 (KLK5) gene and/or to a region of a KLK5 gene product, wherein the synthetic oligonucleotide comprises, consists essentially of, or consists of mCmCmGmAmCC*G*G*G*C*G*T*C*T*T*mCmCmCmCmG/iSp18//iSp18//3CholTEG/ (SEQ ID NO: 465), or a pharmaceutically acceptable salt thereof.

[0274] Embodiment 10. A synthetic oligonucleotide comprising a nucleic acid sequence complementary to or sufficiently complementary to a region of a kallikrein-related peptidase 5 (KLK5) gene and/or to a region of a KLK5 gene product, wherein the synthetic oligonucleotide comprises, consists essentially of, or consists of mGmGmGmUmGT*G*C*A*T*A*T*C*G*C*mAmGmUmCmG/iSp18//iSp18//3CholTEG/ (SEQ ID NO: 516), or a pharmaceutically acceptable salt thereof.

[0275] Embodiment 11. A synthetic oligonucleotide comprising a nucleic acid sequence complementary to or sufficiently complementary to a region of a kallikrein-related peptidase 5 (KLK5) gene and/or to a region of a KLK5 gene product, wherein the synthetic oligonucleotide comprises, consists essentially of, or consists of mGmAmGmCmAG*C*C*A*C*T*G*T*G*G*mAmUmGmCmA/iSp18//iSp18//3CholTEG/ (SEQ ID NO: 596), or a pharmaceutically acceptable salt thereof.

[0276] Embodiment 12. A synthetic oligonucleotide comprising a nucleic acid sequence complementary to or sufficiently complementary to a region of a kallikrein-related peptidase 5 (KLK5) gene and/or to a region of a KLK5 gene product, wherein the synthetic oligonucleotide comprises, consists essentially of, or consists of mCmCmUmGmCA*G*T*G*G*G*C*G*G*C*mCmGmUmGmA/iSp18//iSp18//3CholTEG/ (SEQ ID NO: 614), or a pharmaceutically acceptable salt thereof.

[0277] Embodiment 13. A synthetic oligonucleotide comprising a nucleic acid sequence complementary to or sufficiently complementary to a region of a kallikrein-related peptidase 5 (KLK5) gene and/or to a region of a KLK5 gene product, wherein the synthetic oligonucleotide comprises, consists essentially of, or consists of mCmCmAmGmCA*G*A*G*G*G*A*C*A*A*mUmGmAmGmA/iSp18//iSp18//3CholTEG/ (SEQ ID NO: 829), or a pharmaceutically acceptable salt thereof.

[0278] Embodiment 14. A synthetic oligonucleotide comprising a nucleic acid sequence complementary to or sufficiently complementary to a region of a kallikrein-related peptidase 5 (KLK5) gene and/or to a region of a KLK5 gene product, wherein the synthetic oligonucleotide comprises, consists essentially of, or consists of mCmCmCmAmGC*A*G*A*G*G*G*A*C*A*mAmUmGmAmG/iSp18//iSp18//3CholTEG/ (SEQ ID NO: 830), or a pharmaceutically acceptable salt thereof.

[0279] Embodiment 15. A synthetic oligonucleotide comprising a nucleic acid sequence complementary to or sufficiently complementary to a region of a kallikrein-related peptidase 5 (KLK5) gene and/or to a region of a KLK5 gene product, wherein the synthetic oligonucleotide comprises, consists essentially of, or consists of mUmCmCmCmAG*C*A*G*A*G*G*G*A*C*mAmAmUmGmA/iSp18//iSp18//3CholTEG/ (SEQ ID NO: 831), or a pharmaceutically acceptable salt thereof.

[0280] Embodiment 16. A synthetic oligonucleotide comprising a nucleic acid sequence complementary to or sufficiently complementary to a region of a kallikrein-related peptidase 5 (KLK5) gene and/or to a region of a KLK5 gene product, wherein the synthetic oligonucleotide comprises, consists essentially of, or consists of mAmGmCmCmAG*A*C*A*C*C*A*A*G*C*mAmCmUmUmU/iSp18//iSp18//3CholTEG/ (SEQ ID NO: 852), or a pharmaceutically acceptable salt thereof.

[0281] Embodiment 17. A synthetic oligonucleotide comprising a nucleic acid sequence complementary to or sufficiently complementary to a region of a kallikrein-related peptidase 5 (KLK5) gene and/or to a region of a KLK5 gene product, wherein the synthetic oligonucleotide comprises, consists essentially of, or consists of mCmCmCmCmAG*C*C*A*G*A*C*A*C*C*mAmAmGmCmA/iSp18//iSp18//3CholTEG/ (SEQ ID NO: 856), or a pharmaceutically acceptable salt thereof.

[0282] Embodiment 18. A synthetic oligonucleotide comprising a nucleic acid sequence complementary to or sufficiently complementary to a region of a kallikrein-related peptidase 5 (KLK5) gene and/or to a region of a KLK5 gene product, wherein the synthetic oligonucleotide comprises, consists essentially of, or consists of mUmUmGmGmGG*G*C*T*C*T*T*G*G*T*mUmGmUmCmC/iSp18//iSp18//3CholTEG/ (SEQ ID NO: 875), or a pharmaceutically acceptable salt thereof.

[0283] Embodiment 19. A synthetic oligonucleotide comprising a nucleic acid sequence complementary to or sufficiently complementary to a region of a kallikrein-related peptidase 5 (KLK5) gene and/or to a region of a KLK5 gene product, wherein the synthetic oligonucleotide comprises, consists essentially of, or consists of mCmUmUmGmGG*G*G*C*T*C*T*T*G*G*mUmUmGmUmC/iSp18//iSp18//3CholTEG/ (SEQ ID NO: 876), or a pharmaceutically acceptable salt thereof.

[0284] Embodiment 20. A synthetic oligonucleotide comprising a nucleic acid sequence complementary to or sufficiently complementary to a region of a kallikrein-related peptidase 5 (KLK5) gene and/or to a region of a KLK5 gene product, wherein the synthetic oligonucleotide comprises, consists essentially of, or consists of mCmAmCmUmUG*G*G*G*G*C*T*C*T*T*mGmGmUmUmG/iSp18//iSp18//3CholTEG/ (SEQ ID NO: 878), or a pharmaceutically acceptable salt thereof.

[0285] Embodiment 21. A synthetic oligonucleotide comprising a nucleic acid sequence complementary to or sufficiently complementary to a region of a kallikrein-related peptidase 5 (KLK5) gene and/or to a region of a KLK5 gene product, wherein the synthetic oligonucleotide comprises, consists essentially of, or consists of SEQ ID NO: 879, or a pharmaceutically acceptable salt thereof.

[0286] Embodiment 22. A synthetic oligonucleotide comprising a nucleic acid sequence complementary to or sufficiently complementary to a region of a kallikrein-related peptidase 5 (KLK5) gene and/or to a region of a KLK5 gene product, wherein the synthetic oligonucleotide comprises, consists essentially of, or consists of mGmCmAmCmUT*G*G*G*G*G*C*T*C*T*mUmGmGmUmU/iSp18//iSp18//3CholTEG/ (SEQ ID NO: 891), or a pharmaceutically acceptable salt thereof.

[0287] Embodiment 23. A synthetic oligonucleotide comprising a nucleic acid sequence complementary to or sufficiently complementary to a region of a kallikrein-related peptidase 5 (KLK5) gene and/or to a region of a KLK5 gene product, wherein the synthetic oligonucleotide comprises, consists essentially of, or consists of mCmAmCmUmGG*A*G*G*A*C*C*T*T*A*mGmGmGmAmA/iSp18//iSp18//3CholTEG/ (SEQ ID NO: 901), or a pharmaceutically acceptable salt thereof.

[0288] Embodiment 24. A synthetic oligonucleotide comprising a nucleic acid sequence complementary to or sufficiently complementary to a region of a kallikrein-related peptidase 5 (KLK5) gene and/or to a region of a KLK5 gene product, wherein the synthetic oligonucleotide comprises, consists essentially of, or consists of mCmAmAmGmCA*C*T*G*G*A*G*G*A*C*mCmUmUmAmG/iSp18//iSp18//3CholTEG/ (SEQ ID NO: 905), or a pharmaceutically acceptable salt thereof.

[0289] Embodiment 25. A synthetic oligonucleotide comprising a nucleic acid sequence complementary to or sufficiently complementary to a region of a kallikrein-related peptidase 5 (KLK5) gene and/or to a region of a KLK5 gene product, wherein the synthetic oligonucleotide comprises, consists essentially of, or consists of mAmUmUmCmAA*G*C*A*C*T*G*G*A*G*mGmAmCmCmU/iSp18//iSp18//3CholTEG/ (SEQ ID NO: 908), or a pharmaceutically acceptable salt thereof.

[0290] Embodiment 26. A synthetic oligonucleotide comprising a nucleic acid sequence complementary to or sufficiently complementary to a region of a kallikrein-related peptidase 5 (KLK5) gene and/or to a region of a KLK5 gene product, wherein the synthetic oligonucleotide comprises, consists essentially of, or consists of mUmAmUmUmCA*A*G*C*A*C*T*G*G*A*mGmGmAmCmC/iSp18//iSp18//3CholTEG/ (SEQ ID NO: 909), or a pharmaceutically acceptable salt thereof.

[0291] Embodiment 27. A synthetic oligonucleotide comprising a nucleic acid sequence complementary to or sufficiently complementary to a region of a kallikrein-related peptidase 5 (KLK5) gene and/or to a region of a KLK5 gene product, wherein the synthetic oligonucleotide comprises, consists essentially of, or consists of mUmGmAmUmAT*T*C*A*A*G*C*A*C*T*mGmGmAmGmG/iSp18//iSp18//3CholTEG/ (SEQ ID NO: 912), or a pharmaceutically acceptable salt thereof.

[0292] Embodiment 28. A synthetic oligonucleotide comprising a nucleic acid sequence complementary to or sufficiently complementary to a region of a kallikrein-related peptidase 5 (KLK5) gene and/or to a region of a KLK5 gene product, wherein the synthetic oligonucleotide comprises, consists essentially of, or consists of mCmUmGmAmUA*T*T*C*A*A*G*C*A*C*mUmGmGmAmG/iSp18//iSp18//3CholTEG/ (SEQ ID NO: 913), or a pharmaceutically acceptable salt thereof.

[0293] Embodiment 29. A synthetic oligonucleotide comprising a nucleic acid sequence complementary to or sufficiently complementary to a region of a kallikrein-related peptidase 5 (KLK5) gene and/or to a region of a KLK5 gene product, wherein the synthetic oligonucleotide comprises, consists essentially of, or consists of mGmUmCmUmCG*G*G*T*A*A*G*C*A*T*mCmCmUmCmG/iSp18//iSp18//3CholTEG/ (SEQ ID NO: 954), or a pharmaceutically acceptable salt thereof.

[0294] Embodiment 30. A synthetic oligonucleotide comprising a nucleic acid sequence complementary to or sufficiently complementary to a region of a kallikrein-related peptidase 5 (KLK5) gene and/or to a region of a KLK5 gene product, wherein the synthetic oligonucleotide comprises, consists essentially of, or consists of mGmGmCmGmCA*G*A*A*C*A*T*G*G*T*mGmUmCmAmU/iSp18//iSp18//3CholTEG/ (SEQ ID NO: 980), or a pharmaceutically acceptable salt thereof.

[0295] Embodiment 31. A synthetic oligonucleotide comprising a nucleic acid sequence complementary to or sufficiently complementary to a region of a kallikrein-related peptidase 5 (KLK5) gene and/or to a region of a KLK5 gene product, wherein the synthetic oligonucleotide comprises, consists essentially of, or consists of mAmCmAmGmGC*C*C*C*C*C*A*G*A*A*mUmCmAmCmC/iSp18//iSp18//3CholTEG/ (SEQ ID NO: 1030), or a pharmaceutically acceptable salt thereof.

[0296] Embodiment 32. A synthetic oligonucleotide comprising a nucleic acid sequence complementary to or sufficiently complementary to a region of a kallikrein-related peptidase 5 (KLK5) gene and/or to a region of a KLK5 gene product, wherein the synthetic oligonucleotide comprises, consists essentially of, or consists of mAmGmGmGmUA*A*T*C*T*C*C*C*C*A*mGmGmAmCmA/iSp18//iSp18//3CholTEG/ (SEQ ID NO: 1079), or a pharmaceutically acceptable salt thereof.

[0297] Embodiment 33. A synthetic oligonucleotide comprising a nucleic acid sequence complementary to or sufficiently complementary to a region of a kallikrein-related peptidase 5 (KLK5) gene and/or to a region of a KLK5 gene product, wherein the synthetic oligonucleotide comprises, consists essentially of, or consists of mCmAmCmUmUG*G*T*G*A*A*C*T*T*G*mCmAmGmAmG/iSp18//iSp18//3CholTEG/ (SEQ ID NO: 1135), or a pharmaceutically acceptable salt thereof.

[0298] Embodiment 34. A synthetic oligonucleotide comprising a nucleic acid sequence complementary to or sufficiently complementary to a region of a kallikrein-related peptidase 5 (KLK5) gene and/or to a region of a KLK5 gene product, wherein the synthetic oligonucleotide comprises, consists essentially of, or consists of mGmUmUmUmCC*T*G*G*A*T*C*C*A*C*mUmUmGmGmU/iSp18//iSp18//3CholTEG/ (SEQ ID NO: 1147), or a pharmaceutically acceptable salt thereof.

[0299] Embodiment 35. A synthetic oligonucleotide comprising a nucleic acid sequence complementary to or sufficiently complementary to a region of a kallikrein-related peptidase 5 (KLK5) gene and/or to a region of a KLK5 gene product, wherein the synthetic oligonucleotide comprises, consists essentially of, or consists of mGmGmUmUmUC*C*T*G*G*A*T*C*C*A*mCmUmUmGmG/iSp18//iSp18//3CholTEG/ (SEQ ID NO: 1148), or a pharmaceutically acceptable salt thereof.

[0300] Embodiment 36. A synthetic oligonucleotide comprising a nucleic acid sequence complementary to or sufficiently complementary to a region of a kallikrein-related peptidase 5 (KLK5) gene and/or to a region of a KLK5 gene product, wherein the synthetic oligonucleotide comprises, consists essentially of, or consists of mCmUmGmGmAT*G*G*T*T*T*C*C*T*G*mGmAmUmCmC/iSp18//iSp18//3CholTEG/ (SEQ ID NO: 1154), or a pharmaceutically acceptable salt thereof.

[0301] Embodiment 37. A synthetic oligonucleotide comprising a nucleic acid sequence complementary to or sufficiently complementary to a region of a kallikrein-related peptidase 5 (KLK5) gene and/or to a region of a KLK5 gene product, wherein the synthetic oligonucleotide comprises, consists essentially of, or consists of mCmCmUmGmGA*T*G*G*T*T*T*C*C*T*mGmGmAmUmC/iSp18//iSp18//3CholTEG/ (SEQ ID NO: 1155), or a pharmaceutically acceptable salt thereof.

[0302] Embodiment 38. A synthetic oligonucleotide comprising a nucleic acid sequence complementary to or sufficiently complementary to a region of a kallikrein-related peptidase 5 (KLK5) gene and/or to a region of a KLK5 gene product, wherein the synthetic oligonucleotide comprises, consists essentially of, or consists of mGmCmCmUmGG*A*T*G*G*T*T*T*C*C*mUmGmGmAmU/iSp18//iSp18//3CholTEG/ (SEQ ID NO: 1156), or a pharmaceutically acceptable salt thereof.

[0303] Embodiment 39. A synthetic oligonucleotide comprising a nucleic acid sequence complementary to or sufficiently complementary to a region of a kallikrein-related peptidase 5 (KLK5) gene and/or to a region of a KLK5 gene product, wherein the synthetic oligonucleotide comprises, consists essentially of, or consists of mGmGmCmCmUG*G*A*T*G*G*T*T*T*C*mCmUmGmGmA/iSp18//iSp18//3CholTEG/ (SEQ ID NO: 1157), or a pharmaceutically acceptable salt thereof.

[0304] Embodiment 40. A synthetic oligonucleotide comprising a nucleic acid sequence complementary to or sufficiently complementary to a region of a kallikrein-related peptidase 5 (KLK5) gene and/or to a region of a KLK5 gene product, wherein the synthetic oligonucleotide comprises, consists essentially of, or consists of mAmGmUmUmGG*C*C*T*G*G*A*T*G*G*mUmUmUmCmC/iSp18//iSp18//3CholTEG/ (SEQ ID NO: 1161), or a pharmaceutically acceptable salt thereof.

[0305] Embodiment 41. A synthetic oligonucleotide comprising a nucleic acid sequence complementary to or sufficiently complementary to a region of a kallikrein-related peptidase 5 (KLK5) gene and/or to a region of a KLK5 gene product, wherein the synthetic oligonucleotide comprises, consists essentially of, or consists of mGmAmGmUmUG*G*C*C*T*G*G*A*T*G*mGmUmUmUmC/iSp18//iSp18//3CholTEG/ (SEQ ID NO: 1162), or a pharmaceutically acceptable salt thereof.

[0306] Embodiment 42. A synthetic oligonucleotide comprising a nucleic acid sequence complementary to or sufficiently complementary to a region of a kallikrein-related peptidase 5 (KLK5) gene and/or to a region of a KLK5 gene product, wherein the synthetic oligonucleotide comprises, consists essentially of, or consists of mGmGmAmGmUT*G*G*C*C*T*G*G*A*T*mGmGmUmUmU/iSp18//iSp18//3CholTEG/ (SEQ ID NO: 1163), or a pharmaceutically acceptable salt thereof.

[0307] Embodiment 43. A synthetic oligonucleotide comprising a nucleic acid sequence complementary to or sufficiently complementary to a region of a kallikrein-related peptidase 5 (KLK5) gene and/or to a region of a KLK5 gene product, wherein the synthetic oligonucleotide comprises, consists essentially of, or consists of mCmAmGmGmAG*T*T*G*G*C*C*T*G*G*mAmUmGmGmU/iSp18//iSp18//3CholTEG/ (SEQ ID NO: 1165), or a pharmaceutically acceptable salt thereof.

[0308] Embodiment 44. A synthetic oligonucleotide comprising a nucleic acid sequence complementary to or sufficiently complementary to a region of a kallikrein-related peptidase 5 (KLK5) gene and/or to a region of a KLK5 gene product, wherein the synthetic oligonucleotide comprises, consists essentially of, or consists of mUmCmAmGmGA*G*T*T*G*G*C*C*T*G*mGmAmUmGmG/iSp18//iSp18//3CholTEG/ (SEQ ID NO: 1166), or a pharmaceutically acceptable salt thereof.

[0309] Embodiment 45. A synthetic oligonucleotide comprising a nucleic acid sequence complementary to or sufficiently complementary to a region of a kallikrein-related peptidase 5 (KLK5) gene and/or to a region of a KLK5 gene product, wherein the synthetic oligonucleotide comprises, consists essentially of, or consists of mGmGmGmAmUG*A*C*T*C*A*G*G*A*G*mUmUmGmGmC/iSp18//iSp18//3CholTEG/ (SEQ ID NO: 1174), or a pharmaceutically acceptable salt thereof.

[0310] Embodiment 46. A synthetic oligonucleotide comprising a nucleic acid sequence complementary to or sufficiently complementary to a region of a kallikrein-related peptidase 5 (KLK5) gene and/or to a region of a KLK5 gene product, wherein the synthetic oligonucleotide comprises, consists essentially of, or consists of mGmGmUmGmUG*C*T*G*A*G*T*C*C*T*mGmGmGmAmU/iSp18//iSp18//3CholTEG/ (SEQ ID NO: 1189), or a pharmaceutically acceptable salt thereof.

[0311] Embodiment 47. A synthetic oligonucleotide comprising a nucleic acid sequence complementary to or sufficiently complementary to a region of a kallikrein-related peptidase 5 (KLK5) gene and/or to a region of a KLK5 gene product, wherein the synthetic oligonucleotide comprises, consists essentially of, or consists of mGmGmAmAmGG*A*A*T*G*A*G*G*G*T*mCmUmGmAmA/iSp18//iSp18//3CholTEG/ (SEQ ID NO: 1248), or a pharmaceutically acceptable salt thereof.

[0312] Embodiment 48. A synthetic oligonucleotide comprising a nucleic acid sequence complementary to or sufficiently complementary to a region of a kallikrein-related peptidase 5 (KLK5) gene and/or to a region of a KLK5 gene product, wherein the synthetic oligonucleotide comprises, consists essentially of, or consists of mCmAmAmCmAT*C*T*C*T*G*G*G*A*A*mGmGmAmAmU/iSp18//iSp18//3CholTEG/ (SEQ ID NO: 1259), or a pharmaceutically acceptable salt thereof.

[0313] Embodiment 49. A synthetic oligonucleotide comprising a nucleic acid sequence complementary to or sufficiently complementary to a region of a kallikrein-related peptidase 5 (KLK5) gene and/or to a region of a KLK5 gene product, wherein the synthetic oligonucleotide comprises, consists essentially of, or consists of mUmCmUmCmAA*C*A*T*C*T*C*T*G*G*mGmAmAmGmG/iSp18//iSp18//3CholTEG/ (SEQ ID NO: 1262), or a pharmaceutically acceptable salt thereof.

[0314] Embodiment 50. A synthetic oligonucleotide comprising a nucleic acid sequence complementary to or sufficiently complementary to a region of a kallikrein-related peptidase 5 (KLK5) gene and/or to a region of a KLK5 gene product, wherein the synthetic oligonucleotide comprises, consists essentially of, or consists of mCmAmUmUmCT*C*A*A*C*A*T*C*T*C*mUmGmGmGmA/iSp18//iSp18//3CholTEG/ (SEQ ID NO: 1265), or a pharmaceutically acceptable salt thereof.

[0315] Embodiment 51. A synthetic oligonucleotide comprising a nucleic acid sequence complementary to or sufficiently complementary to a region of a kallikrein-related peptidase 5 (KLK5) gene and/or to a region of a KLK5 gene product, wherein the synthetic oligonucleotide comprises, consists essentially of, or consists of mAmCmAmUmUC*T*C*A*A*C*A*T*C*T*mCmUmGmGmG/iSp18//iSp18//3CholTEG/ (SEQ ID NO: 1266), or a pharmaceutically acceptable salt thereof.

[0316] Embodiment 52. A synthetic oligonucleotide comprising a nucleic acid sequence complementary to or sufficiently complementary to a region of a kallikrein-related peptidase 5 (KLK5) gene and/or to a region of a KLK5 gene product, wherein the synthetic oligonucleotide comprises, consists essentially of, or consists of mAmAmCmAmUT*C*T*C*A*A*C*A*T*C*mUmCmUmGmG/iSp18//iSp18//3CholTEG/ (SEQ ID NO: 1267), or a pharmaceutically acceptable salt thereof.

[0317] Embodiment 53. A synthetic oligonucleotide comprising a nucleic acid sequence complementary to or sufficiently complementary to a region of a kallikrein-related peptidase 5 (KLK5) gene and/or to a region of a KLK5 gene product, wherein the synthetic oligonucleotide comprises, consists essentially of, or consists of mUmGmAmAmCA*T*T*C*T*C*A*A*C*A*mUmCmUmCmU/iSp18//iSp18//3CholTEG/ (SEQ ID NO: 1269), or a pharmaceutically acceptable salt thereof.

[0318] Embodiment 54. A synthetic oligonucleotide comprising a nucleic acid sequence complementary to or sufficiently complementary to a region of a kallikrein-related peptidase 5 (KLK5) gene and/or to a region of a KLK5 gene product, wherein the synthetic oligonucleotide comprises, consists essentially of, or consists of mGmAmGmAmGA*T*G*A*A*C*A**T**C*mUmCmAmAmC/iSp18//iSp18//3CholTEG/ (SEQ ID NO: 1275), or a pharmaceutically acceptable salt thereof.

[0319] Embodiment 55. A synthetic oligonucleotide comprising a nucleic acid sequence complementary to or sufficiently complementary to a region of a kallikrein-related peptidase 5 (KLK5) gene and/or to a region of a KLK5 gene product, wherein the synthetic oligonucleotide comprises, consists essentially of, or consists of mUmGmGmAmGA*G*A*T*G*A*A*C*A*T*mUmCmUmCmA/iSp18//iSp18//3CholTEG/ (SEQ ID NO: 1277), or a pharmaceutically acceptable salt thereof.

[0320] Embodiment 56. A synthetic oligonucleotide comprising a nucleic acid sequence complementary to or sufficiently complementary to a region of a kallikrein-related peptidase 5 (KLK5) gene and/or to a region of a KLK5 gene product, wherein the synthetic oligonucleotide comprises, consists essentially of, or consists of mCmUmGmGmAG*A*G*A*T*G*A*A*C*A*mUmUmCmUmC/iSp18//iSp18//3CholTEG/ (SEQ ID NO: 1278), or a pharmaceutically acceptable salt thereof.

[0321] Embodiment 57. A synthetic oligonucleotide comprising a nucleic acid sequence complementary to or sufficiently complementary to a region of a kallikrein-related peptidase 5 (KLK5) gene and/or to a region of a KLK5 gene product, wherein the synthetic oligonucleotide comprises, consists essentially of, or consists of mGmCmUmGmGA*G*A*G*A*T*G*A*A*C*mAmUmUmCmU/iSp18//iSp18//3CholTEG/ (SEQ ID NO: 1279), or a pharmaceutically acceptable salt thereof.

[0322] Embodiment 58. A synthetic oligonucleotide comprising a nucleic acid sequence complementary to or sufficiently complementary to a region of a kallikrein-related peptidase 5 (KLK5) gene and/or to a region of a KLK5 gene product, wherein the synthetic oligonucleotide comprises, consists essentially of, or consists of mCmAmUmGmGG*G*T*C*A*G*G*G*G*C*mUmGmGmAmG/iSp18//iSp18//3CholTEG/ (SEQ ID NO: 1292), or a pharmaceutically acceptable salt thereof.

[0323] Embodiment 59. A synthetic oligonucleotide comprising a nucleic acid sequence complementary to or sufficiently complementary to a region of a kallikrein-related peptidase 5 (KLK5) gene and/or to a region of a KLK5 gene product, wherein the synthetic oligonucleotide comprises, consists essentially of, or consists of mGmCmAmGmAC*C*C*T*G*A*G*T*C*C*mAmGmGmAmG/iSp18//iSp18//3CholTEG/ (SEQ ID NO: 1312), or a pharmaceutically acceptable salt thereof.

[0324] Embodiment 60. A synthetic oligonucleotide comprising a nucleic acid sequence complementary to or sufficiently complementary to a region of a kallikrein-related peptidase 5 (KLK5) gene and/or to a region of a KLK5 gene product, wherein the synthetic oligonucleotide comprises, consists essentially of, or consists of mGmGmUmCmAG*C*C*C*A*A*T*G*T*G*mGmGmGmGmA/iSp18//iSp18//3CholTEG/ (SEQ ID NO: 1334), or a pharmaceutically acceptable salt thereof.

[0325] Embodiment 61. A synthetic oligonucleotide comprising a nucleic acid sequence complementary to or sufficiently complementary to a region of a kallikrein-related peptidase 5 (KLK5) gene and/or to a region of a KLK5 gene product, wherein the synthetic oligonucleotide comprises, consists essentially of, or consists of mCmGmGmUmCA*G*C*C*C*A*A*T*G*T*mGmGmGmGmG/iSp18//iSp18//3CholTEG/ (SEQ ID NO: 1335), or a pharmaceutically acceptable salt thereof.

[0326] Embodiment 62. A synthetic oligonucleotide comprising a nucleic acid sequence complementary to or sufficiently complementary to a region of a kallikrein-related peptidase 5 (KLK5) gene and/or to a region of a KLK5 gene product, wherein the synthetic oligonucleotide comprises, consists essentially of, or consists of mCmAmCmGmGT*C*A*G*C*C*C*A*A*T*mGmUmGmGmG/iSp18//iSp18//3CholTEG/ (SEQ ID NO: 1337), or a pharmaceutically acceptable salt thereof.

[0327] Embodiment 63. A synthetic oligonucleotide comprising a nucleic acid sequence complementary to or sufficiently complementary to a region of a kallikrein-related peptidase 5 (KLK5) gene and/or to a region of a KLK5 gene product, wherein the synthetic oligonucleotide comprises, consists essentially of, or consists of mGmAmGmAmCA*C*G*G*T*C*A*G*C*C*mCmAmAmUmG/iSp18//iSp18//3CholTEG/ (SEQ ID NO: 1341), or a pharmaceutically acceptable salt thereof.

[0328] Embodiment 64. A synthetic oligonucleotide comprising a nucleic acid sequence complementary to or sufficiently complementary to a region of a kallikrein-related peptidase 5 (KLK5) gene and/or to a region of a KLK5 gene product, wherein the synthetic oligonucleotide comprises, consists essentially of, or consists of mAmGmAmGmAC*A*C*G*G*T*C*A*G*C*mCmCmAmAmU/iSp18//iSp18//3CholTEG/ (SEQ ID NO: 1342), or a pharmaceutically acceptable salt thereof.

[0329] Embodiment 65. A synthetic oligonucleotide comprising a nucleic acid sequence complementary to or sufficiently complementary to a region of a kallikrein-related peptidase 5 (KLK5) gene and/or to a region of a KLK5 gene product, wherein the synthetic oligonucleotide comprises, consists essentially of, or consists of mGmAmGmAmGA*C*A*C*G*G*T*C*A*G*mCmCmCmAmA/iSp18//iSp18//3CholTEG/ (SEQ ID NO: 1343), or a pharmaceutically acceptable salt thereof.

[0330] Embodiment 66. A synthetic oligonucleotide comprising a nucleic acid sequence complementary to or sufficiently complementary to a region of a kallikrein-related peptidase 5 (KLK5) gene and/or to a region of a KLK5 gene product, wherein the synthetic oligonucleotide comprises, consists essentially of, or consists of mAmGmAmGmAG*A*C*A*C*G*G*T*C*A*mGmCmCmCmA/iSp18//iSp18//3CholTEG/ (SEQ ID NO: 1344), or a pharmaceutically acceptable salt thereof.

[0331] Embodiment 67. A synthetic oligonucleotide comprising a nucleic acid sequence complementary to or sufficiently complementary to a region of a kallikrein-related peptidase 5 (KLK5) gene and/or to a region of a KLK5 gene product, wherein the synthetic oligonucleotide comprises, consists essentially of, or consists of mUmAmGmAmGA*G*A*C*A*C*G*G*T*C*mAmGmCmCmC/iSp18//iSp18//3CholTEG/ (SEQ ID NO: 1345), or a pharmaceutically acceptable salt thereof.

[0332] Embodiment 68. A synthetic oligonucleotide comprising a nucleic acid sequence complementary to or sufficiently complementary to a region of a kallikrein-related peptidase 5 (KLK5) gene and/or to a region of a KLK5 gene product, wherein the synthetic oligonucleotide comprises, consists essentially of, or consists of mCmUmAmGmAG*A*G*A*C*A*C*G*G*T*mCmAmGmCmC/iSp18//iSp18//3CholTEG/ (SEQ ID NO: 1346), or a pharmaceutically acceptable salt thereof.

[0333] Embodiment 69. A synthetic oligonucleotide comprising a nucleic acid sequence complementary to or sufficiently complementary to a region of a kallikrein-related peptidase 5 (KLK5) gene and/or to a region of a KLK5 gene product, wherein the synthetic oligonucleotide comprises, consists essentially of, or consists of mGmGmAmAmAT*T*G*T*T*C*C*C*A*G*mGmGmUmUmC/iSp18//iSp18//3CholTEG/ (SEQ ID NO: 1368), or a pharmaceutically acceptable salt thereof.

[0334] Embodiment 70. A synthetic oligonucleotide comprising a nucleic acid sequence complementary to or sufficiently complementary to a region of a kallikrein-related peptidase 5 (KLK5) gene and/or to a region of a KLK5 gene product, wherein the synthetic oligonucleotide comprises, consists essentially of, or consists of mGmAmGmAmCG*C*A*A*C*C*C*C*C*G*mCmCmCmUmG/iSp18//iSp18//3ChoTEG/(SEQ ID NO: 1397), or a pharmaceutically acceptable salt thereof.

[0335] Embodiment 71. A synthetic oligonucleotide comprising a nucleic acid sequence complementary to or sufficiently complementary to a region of a kallikrein-related peptidase 5 (KLK5) gene and/or to a region of a KLK5 gene product, wherein the synthetic oligonucleotide comprises, consists essentially of, or consists of mAmAmAmUmUT*G*G*G*T*C*A*G*A*G*mCmUmGmCmA/iSp18//iSp18//3CholTEG/ (SEQ ID NO: 1466), or a pharmaceutically acceptable salt thereof.

[0336] Embodiment 72. A synthetic oligonucleotide comprising a nucleic acid sequence complementary to or sufficiently complementary to a region of a kallikrein-related peptidase 5 (KLK5) gene and/or to a region of a KLK5 gene product, wherein the synthetic oligonucleotide comprises, consists essentially of, or consists of mCmUmGmGmGA*C*T*A*A*A*T*T*T*G*mGmGmUmCmA/iSp18//iSp18//3CholTEG/ (SEQ ID NO: 1474), or a pharmaceutically acceptable salt thereof.

[0337] Embodiment 73. A synthetic oligonucleotide comprising a nucleic acid sequence complementary to or sufficiently complementary to a region of a kallikrein-related peptidase 5 (KLK5) gene and/or to a region of a KLK5 gene product, wherein the synthetic oligonucleotide comprises, consists essentially of, or consists of mUmCmUmGmGG*A*C*T*A*A*A*T*T*T*mGmGmGmUmC/iSp18//iSp18//3CholTEG/ (SEQ ID NO: 1475), or a pharmaceutically acceptable salt thereof.

[0338] Embodiment 74. A synthetic oligonucleotide comprising a nucleic acid sequence complementary to or sufficiently complementary to a region of a kallikrein-related peptidase 5 (KLK5) gene and/or to a region of a KLK5 gene product, wherein the synthetic oligonucleotide comprises, consists essentially of, or consists of mCmAmCmGmGmUmGmUmUmAmGmAmGmGmGmGmUmGmGmU/iSp18//iSp18//3CholTEG/ (SEQ ID NO: 1624), or a pharmaceutically acceptable salt thereof.

[0339] Embodiment 75. A synthetic oligonucleotide comprising a nucleic acid sequence complementary to or sufficiently complementary to a region of a kallikrein-related peptidase 5 (KLK5) gene and/or to a region of a KLK5 gene product, wherein the nucleic acid sequence comprises, consists essentially of, or consists of SEQ ID NO: 1997, or a pharmaceutically acceptable salt thereof.

[0340] Embodiment 76. A synthetic oligonucleotide comprising a nucleic acid sequence complementary to or sufficiently complementary to a region of a kallikrein-related peptidase 5 (KLK5) gene and/or to a region of a KLK5 gene product, wherein the nucleic acid sequence comprises, consists essentially of, or consists of SEQ ID NO: 2007, or a pharmaceutically acceptable salt thereof.

[0341] Embodiment 77. A synthetic oligonucleotide comprising a nucleic acid sequence complementary to or sufficiently complementary to a region of a kallikrein-related peptidase 5 (KLK5) gene and/or to a region of a KLK5 gene product, wherein the nucleic acid sequence comprises, consists essentially of, or consists of SEQ ID NO: 2010, or a pharmaceutically acceptable salt thereof.

[0342] Embodiment 78. A synthetic oligonucleotide comprising a nucleic acid sequence complementary to or sufficiently complementary to a region of a kallikrein-related peptidase 5 (KLK5) gene and/or to a region of a KLK5 gene product, wherein the nucleic acid sequence comprises, consists essentially of, or consists of SEQ ID NO: 2011, or a pharmaceutically acceptable salt thereof.

[0343] Embodiment 79. A synthetic oligonucleotide comprising a nucleic acid sequence complementary to or sufficiently complementary to a region of a kallikrein-related peptidase 5 (KLK5) gene and/or to a region of a KLK5 gene product, wherein the nucleic acid sequence comprises, consists essentially of, or consists of SEQ ID NO: 2012, or a pharmaceutically acceptable salt thereof.

[0344] Embodiment 80. A synthetic oligonucleotide comprising a nucleic acid sequence complementary to or sufficiently complementary to a region of a kallikrein-related peptidase 5 (KLK5) gene and/or to a region of a KLK5 gene product, wherein the nucleic acid sequence comprises, consists essentially of, or consists of SEQ ID NO: 2173, or a pharmaceutically acceptable salt thereof.

[0345] Embodiment 81. A synthetic oligonucleotide comprising a nucleic acid sequence complementary to or sufficiently complementary to a region of a kallikrein-related peptidase 5 (KLK5) gene and/or to a region of a KLK5 gene product, wherein the nucleic acid sequence comprises, consists essentially of, or consists of SEQ ID NO: 2241, or a pharmaceutically acceptable salt thereof.

[0346] Embodiment 82. A synthetic oligonucleotide comprising a nucleic acid sequence complementary to or sufficiently complementary to a region of a kallikrein-related peptidase 5 (KLK5) gene and/or to a region of a KLK5 gene product, wherein the nucleic acid sequence comprises, consists essentially of, or consists of SEQ ID NO: 2269, or a pharmaceutically acceptable salt thereof.

[0347] Embodiment 83. A synthetic oligonucleotide comprising a nucleic acid sequence complementary to or sufficiently complementary to a region of a kallikrein-related peptidase 5 (KLK5) gene and/or to a region of a KLK5 gene product, wherein the nucleic acid sequence comprises, consists essentially of, or consists of SEQ ID NO: 465, or a pharmaceutically acceptable salt thereof.

[0348] Embodiment 84. A synthetic oligonucleotide comprising a nucleic acid sequence complementary to or sufficiently complementary to a region of a kallikrein-related peptidase 5 (KLK5) gene and/or to a region of a KLK5 gene product, wherein the nucleic acid sequence comprises, consists essentially of, or consists of SEQ ID NO: 2343, or a pharmaceutically acceptable salt thereof.

[0349] Embodiment 85. A synthetic oligonucleotide comprising a nucleic acid sequence complementary to or sufficiently complementary to a region of a kallikrein-related peptidase 5 (KLK5) gene and/or to a region of a KLK5 gene product, wherein the nucleic acid sequence comprises, consists essentially of, or consists of SEQ ID NO: 2412, or a pharmaceutically acceptable salt thereof.

[0350] Embodiment 86. A synthetic oligonucleotide comprising a nucleic acid sequence complementary to or sufficiently complementary to a region of a kallikrein-related peptidase 5 (KLK5) gene and/or to a region of a KLK5 gene product, wherein the nucleic acid sequence comprises, consists essentially of, or consists of SEQ ID NO: 2429, or a pharmaceutically acceptable salt thereof.

[0351] Embodiment 87. A synthetic oligonucleotide comprising a nucleic acid sequence complementary to or sufficiently complementary to a region of a kallikrein-related peptidase 5 (KLK5) gene and/or to a region of a KLK5 gene product, wherein the nucleic acid sequence comprises, consists essentially of, or consists of SEQ ID NO: 2624, or a pharmaceutically acceptable salt thereof.

[0352] Embodiment 88. A synthetic oligonucleotide comprising a nucleic acid sequence complementary to or sufficiently complementary to a region of a kallikrein-related peptidase 5 (KLK5) gene and/or to a region of a KLK5 gene product, wherein the nucleic acid sequence comprises, consists essentially of, or consists of SEQ ID NO: 2625, or a pharmaceutically acceptable salt thereof.

[0353] Embodiment 89. A synthetic oligonucleotide comprising a nucleic acid sequence complementary to or sufficiently complementary to a region of a kallikrein-related peptidase 5 (KLK5) gene and/or to a region of a KLK5 gene product, wherein the nucleic acid sequence comprises, consists essentially of, or consists of SEQ ID NO: 2626, or a pharmaceutically acceptable salt thereof.

[0354] Embodiment 90. A synthetic oligonucleotide comprising a nucleic acid sequence complementary to or sufficiently complementary to a region of a kallikrein-related peptidase 5 (KLK5) gene and/or to a region of a KLK5 gene product, wherein the nucleic acid sequence comprises, consists essentially of, or consists of SEQ ID NO: 2641, or a pharmaceutically acceptable salt thereof.

[0355] Embodiment 91. A synthetic oligonucleotide comprising a nucleic acid sequence complementary to or sufficiently complementary to a region of a kallikrein-related peptidase 5 (KLK5) gene and/or to a region of a KLK5 gene product, wherein the nucleic acid sequence comprises, consists essentially of, or consists of SEQ ID NO: 856, or a pharmaceutically acceptable salt thereof.

[0356] Embodiment 92. A synthetic oligonucleotide comprising a nucleic acid sequence complementary to or sufficiently complementary to a region of a kallikrein-related peptidase 5 (KLK5) gene and/or to a region of a KLK5 gene product, wherein the nucleic acid sequence comprises, consists essentially of, or consists of SEQ ID NO: 2660, or a pharmaceutically acceptable salt thereof.

[0357] Embodiment 93. A synthetic oligonucleotide comprising a nucleic acid sequence complementary to or sufficiently complementary to a region of a kallikrein-related peptidase 5 (KLK5) gene and/or to a region of a KLK5 gene product, wherein the nucleic acid sequence comprises, consists essentially of, or consists of SEQ ID NO: 2661, or a pharmaceutically acceptable salt thereof.

[0358] Embodiment 94. A synthetic oligonucleotide comprising a nucleic acid sequence complementary to or sufficiently complementary to a region of a kallikrein-related peptidase 5 (KLK5) gene and/or to a region of a KLK5 gene product, wherein the nucleic acid sequence comprises, consists essentially of, or consists of SEQ ID NO: 2663, or a pharmaceutically acceptable salt thereof.

[0359] Embodiment 95. A synthetic oligonucleotide comprising a nucleic acid sequence complementary to or sufficiently complementary to a region of a kallikrein-related peptidase 5 (KLK5) gene and/or to a region of a KLK5 gene product, wherein the nucleic acid sequence comprises, consists essentially of, or consists of SEQ ID NO: 2664, or a pharmaceutically acceptable salt thereof.

[0360] Embodiment 96. A synthetic oligonucleotide comprising a nucleic acid sequence complementary to or sufficiently complementary to a region of a kallikrein-related peptidase 5 (KLK5) gene and/or to a region of a KLK5 gene product, wherein the nucleic acid sequence comprises, consists essentially of, or consists of SEQ ID NO: 2675, or a pharmaceutically acceptable salt thereof.

[0361] Embodiment 97. A synthetic oligonucleotide comprising a nucleic acid sequence complementary to or sufficiently complementary to a region of a kallikrein-related peptidase 5 (KLK5) gene and/or to a region of a KLK5 gene product, wherein the nucleic acid sequence comprises, consists essentially of, or consists of SEQ ID NO: 2685, or a pharmaceutically acceptable salt thereof.

[0362] Embodiment 98. A synthetic oligonucleotide comprising a nucleic acid sequence complementary to or sufficiently complementary to a region of a kallikrein-related peptidase 5 (KLK5) gene and/or to a region of a KLK5 gene product, wherein the nucleic acid sequence comprises, consists essentially of, or consists of SEQ ID NO: 2689, or a pharmaceutically acceptable salt thereof.

[0363] Embodiment 99. A synthetic oligonucleotide comprising a nucleic acid sequence complementary to or sufficiently complementary to a region of a kallikrein-related peptidase 5 (KLK5) gene and/or to a region of a KLK5 gene product, wherein the nucleic acid sequence comprises, consists essentially of, or consists of SEQ ID NO: 2692, or a pharmaceutically acceptable salt thereof.

[0364] Embodiment 100. A synthetic oligonucleotide comprising a nucleic acid sequence complementary to or sufficiently complementary to a region of a kallikrein-related peptidase 5 (KLK5) gene and/or to a region of a KLK5 gene product, wherein the nucleic acid sequence comprises, consists essentially of, or consists of SEQ ID NO: 2693, or a pharmaceutically acceptable salt thereof.

[0365] Embodiment 101. A synthetic oligonucleotide comprising a nucleic acid sequence complementary to or sufficiently complementary to a region of a kallikrein-related peptidase 5 (KLK5) gene and/or to a region of a KLK5 gene product, wherein the nucleic acid sequence comprises, consists essentially of, or consists of SEQ ID NO: 2696, or a pharmaceutically acceptable salt thereof.

[0366] Embodiment 102. A synthetic oligonucleotide comprising a nucleic acid sequence complementary to or sufficiently complementary to a region of a kallikrein-related peptidase 5 (KLK5) gene and/or to a region of a KLK5 gene product, wherein the nucleic acid sequence comprises, consists essentially of, or consists of SEQ ID NO: 2697, or a pharmaceutically acceptable salt thereof.

[0367] Embodiment 103. A synthetic oligonucleotide comprising a nucleic acid sequence complementary to or sufficiently complementary to a region of a kallikrein-related peptidase 5 (KLK5) gene and/or to a region of a KLK5 gene product, wherein the nucleic acid sequence comprises, consists essentially of, or consists of SEQ ID NO: 2736, or a pharmaceutically acceptable salt thereof.

[0368] Embodiment 104. A synthetic oligonucleotide comprising a nucleic acid sequence complementary to or sufficiently complementary to a region of a kallikrein-related peptidase 5 (KLK5) gene and/or to a region of a KLK5 gene product, wherein the nucleic acid sequence comprises, consists essentially of, or consists of SEQ ID NO: 2762, or a pharmaceutically acceptable salt thereof.

[0369] Embodiment 105. A synthetic oligonucleotide comprising a nucleic acid sequence complementary to or sufficiently complementary to a region of a kallikrein-related peptidase 5 (KLK5) gene and/or to a region of a KLK5 gene product, wherein the nucleic acid sequence comprises, consists essentially of, or consists of SEQ ID NO: 2807, or a pharmaceutically acceptable salt thereof.

[0370] Embodiment 106. A synthetic oligonucleotide comprising a nucleic acid sequence complementary to or sufficiently complementary to a region of a kallikrein-related peptidase 5 (KLK5) gene and/or to a region of a KLK5 gene product, wherein the nucleic acid sequence comprises, consists essentially of, or consists of SEQ ID NO: 2840, or a pharmaceutically acceptable salt thereof.

[0371] Embodiment 107. A synthetic oligonucleotide comprising a nucleic acid sequence complementary to or sufficiently complementary to a region of a kallikrein-related peptidase 5 (KLK5) gene and/or to a region of a KLK5 gene product, wherein the nucleic acid sequence comprises, consists essentially of, or consists of SEQ ID NO: 2883, or a pharmaceutically acceptable salt thereof.

[0372] Embodiment 108. A synthetic oligonucleotide comprising a nucleic acid sequence complementary to or sufficiently complementary to a region of a kallikrein-related peptidase 5 (KLK5) gene and/or to a region of a KLK5 gene product, wherein the nucleic acid sequence comprises, consists essentially of, or consists of SEQ ID NO: 2895, or a pharmaceutically acceptable salt thereof.

[0373] Embodiment 109. A synthetic oligonucleotide comprising a nucleic acid sequence complementary to or sufficiently complementary to a region of a kallikrein-related peptidase 5 (KLK5) gene and/or to a region of a KLK5 gene product, wherein the nucleic acid sequence comprises, consists essentially of, or consists of SEQ ID NO: 2896, or a pharmaceutically acceptable salt thereof.

[0374] Embodiment 110. A synthetic oligonucleotide comprising a nucleic acid sequence complementary to or sufficiently complementary to a region of a kallikrein-related peptidase 5 (KLK5) gene and/or to a region of a KLK5 gene product, wherein the nucleic acid sequence comprises, consists essentially of, or consists of SEQ ID NO: 2902, or a pharmaceutically acceptable salt thereof.

[0375] Embodiment 111. A synthetic oligonucleotide comprising a nucleic acid sequence complementary to or sufficiently complementary to a region of a kallikrein-related peptidase 5 (KLK5) gene and/or to a region of a KLK5 gene product, wherein the nucleic acid sequence comprises, consists essentially of, or consists of SEQ ID NO: 2903, or a pharmaceutically acceptable salt thereof.

[0376] Embodiment 112. A synthetic oligonucleotide comprising a nucleic acid sequence complementary to or sufficiently complementary to a region of a kallikrein-related peptidase 5 (KLK5) gene and/or to a region of a KLK5 gene product, wherein the nucleic acid sequence comprises, consists essentially of, or consists of SEQ ID NO: 2904, or a pharmaceutically acceptable salt thereof.

[0377] Embodiment 113. A synthetic oligonucleotide comprising a nucleic acid sequence complementary to or sufficiently complementary to a region of a kallikrein-related peptidase 5 (KLK5) gene and/or to a region of a KLK5 gene product, wherein the nucleic acid sequence comprises, consists essentially of, or consists of SEQ ID NO: 2905, or a pharmaceutically acceptable salt thereof.

[0378] Embodiment 114. A synthetic oligonucleotide comprising a nucleic acid sequence complementary to or sufficiently complementary to a region of a kallikrein-related peptidase 5 (KLK5) gene and/or to a region of a KLK5 gene product, wherein the nucleic acid sequence comprises, consists essentially of, or consists of SEQ ID NO: 2909, or a pharmaceutically acceptable salt thereof.

[0379] Embodiment 115. A synthetic oligonucleotide comprising a nucleic acid sequence complementary to or sufficiently complementary to a region of a kallikrein-related peptidase 5 (KLK5) gene and/or to a region of a KLK5 gene product, wherein the nucleic acid sequence comprises, consists essentially of, or consists of SEQ ID NO: 2910, or a pharmaceutically acceptable salt thereof.

[0380] Embodiment 116. A synthetic oligonucleotide comprising a nucleic acid sequence complementary to or sufficiently complementary to a region of a kallikrein-related peptidase 5 (KLK5) gene and/or to a region of a KLK5 gene product, wherein the nucleic acid sequence comprises, consists essentially of, or consists of SEQ ID NO: 2911, or a pharmaceutically acceptable salt thereof.

[0381] Embodiment 117. A synthetic oligonucleotide comprising a nucleic acid sequence complementary to or sufficiently complementary to a region of a kallikrein-related peptidase 5 (KLK5) gene and/or to a region of a KLK5 gene product, wherein the nucleic acid sequence comprises, consists essentially of, or consists of SEQ ID NO: 2913, or a pharmaceutically acceptable salt thereof.

[0382] Embodiment 118. A synthetic oligonucleotide comprising a nucleic acid sequence complementary to or sufficiently complementary to a region of a kallikrein-related peptidase 5 (KLK5) gene and/or to a region of a KLK5 gene product, wherein the nucleic acid sequence comprises, consists essentially of, or consists of SEQ ID NO: 2914, or a pharmaceutically acceptable salt thereof.

[0383] Embodiment 119. A synthetic oligonucleotide comprising a nucleic acid sequence complementary to or sufficiently complementary to a region of a kallikrein-related peptidase 5 (KLK5) gene and/or to a region of a KLK5 gene product, wherein the nucleic acid sequence comprises, consists essentially of, or consists of SEQ ID NO: 2922, or a pharmaceutically acceptable salt thereof.

[0384] Embodiment 120. A synthetic oligonucleotide comprising a nucleic acid sequence complementary to or sufficiently complementary to a region of a kallikrein-related peptidase 5 (KLK5) gene and/or to a region of a KLK5 gene product, wherein the nucleic acid sequence comprises, consists essentially of, or consists of SEQ ID NO: 2937, or a pharmaceutically acceptable salt thereof.

[0385] Embodiment 121. A synthetic oligonucleotide comprising a nucleic acid sequence complementary to or sufficiently complementary to a region of a kallikrein-related peptidase 5 (KLK5) gene and/or to a region of a KLK5 gene product, wherein the nucleic acid sequence comprises, consists essentially of, or consists of SEQ ID NO: 2991, or a pharmaceutically acceptable salt thereof.

[0386] Embodiment 122. A synthetic oligonucleotide comprising a nucleic acid sequence complementary to or sufficiently complementary to a region of a kallikrein-related peptidase 5 (KLK5) gene and/or to a region of a KLK5 gene product, wherein the nucleic acid sequence comprises, consists essentially of, or consists of SEQ ID NO: 3002, or a pharmaceutically acceptable salt thereof.

[0387] Embodiment 123. A synthetic oligonucleotide comprising a nucleic acid sequence complementary to or sufficiently complementary to a region of a kallikrein-related peptidase 5 (KLK5) gene and/or to a region of a KLK5 gene product, wherein the nucleic acid sequence comprises, consists essentially of, or consists of SEQ ID NO: 3005, or a pharmaceutically acceptable salt thereof.

[0388] Embodiment 124. A synthetic oligonucleotide comprising a nucleic acid sequence complementary to or sufficiently complementary to a region of a kallikrein-related peptidase 5 (KLK5) gene and/or to a region of a KLK5 gene product, wherein the nucleic acid sequence comprises, consists essentially of, or consists of SEQ ID NO: 3008, or a pharmaceutically acceptable salt thereof.

[0389] Embodiment 125. A synthetic oligonucleotide comprising a nucleic acid sequence complementary to or sufficiently complementary to a region of a kallikrein-related peptidase 5 (KLK5) gene and/or to a region of a KLK5 gene product, wherein the nucleic acid sequence comprises, consists essentially of, or consists of SEQ ID NO: 3009, or a pharmaceutically acceptable salt thereof.

[0390] Embodiment 126. A synthetic oligonucleotide comprising a nucleic acid sequence complementary to or sufficiently complementary to a region of a kallikrein-related peptidase 5 (KLK5) gene and/or to a region of a KLK5 gene product, wherein the nucleic acid sequence comprises, consists essentially of, or consists of SEQ ID NO: 3010, or a pharmaceutically acceptable salt thereof.

[0391] Embodiment 127. A synthetic oligonucleotide comprising a nucleic acid sequence complementary to or sufficiently complementary to a region of a kallikrein-related peptidase 5 (KLK5) gene and/or to a region of a KLK5 gene product, wherein the nucleic acid sequence comprises, consists essentially of, or consists of SEQ ID NO: 3012, or a pharmaceutically acceptable salt thereof.

[0392] Embodiment 128. A synthetic oligonucleotide comprising a nucleic acid sequence complementary to or sufficiently complementary to a region of a kallikrein-related peptidase 5 (KLK5) gene and/or to a region of a KLK5 gene product, wherein the nucleic acid sequence comprises, consists essentially of, or consists of SEQ ID NO: 3017, or a pharmaceutically acceptable salt thereof.

[0393] Embodiment 129. A synthetic oligonucleotide comprising a nucleic acid sequence complementary to or sufficiently complementary to a region of a kallikrein-related peptidase 5 (KLK5) gene and/or to a region of a KLK5 gene product, wherein the nucleic acid sequence comprises, consists essentially of, or consists of SEQ ID NO: 3019, or a pharmaceutically acceptable salt thereof.

[0394] Embodiment 130. A synthetic oligonucleotide comprising a nucleic acid sequence complementary to or sufficiently complementary to a region of a kallikrein-related peptidase 5 (KLK5) gene and/or to a region of a KLK5 gene product, wherein the nucleic acid sequence comprises, consists essentially of, or consists of SEQ ID NO: 3020, or a pharmaceutically acceptable salt thereof.

[0395] Embodiment 131. A synthetic oligonucleotide comprising a nucleic acid sequence complementary to or sufficiently complementary to a region of a kallikrein-related peptidase 5 (KLK5) gene and/or to a region of a KLK5 gene product, wherein the nucleic acid sequence comprises, consists essentially of, or consists of SEQ ID NO: 3021, or a pharmaceutically acceptable salt thereof.

[0396] Embodiment 132. A synthetic oligonucleotide comprising a nucleic acid sequence complementary to or sufficiently complementary to a region of a kallikrein-related peptidase 5 (KLK5) gene and/or to a region of a KLK5 gene product, wherein the nucleic acid sequence comprises, consists essentially of, or consists of SEQ ID NO: 3033, or a pharmaceutically acceptable salt thereof.

[0397] Embodiment 133. A synthetic oligonucleotide comprising a nucleic acid sequence complementary to or sufficiently complementary to a region of a kallikrein-related peptidase 5 (KLK5) gene and/or to a region of a KLK5 gene product, wherein the nucleic acid sequence comprises, consists essentially of, or consists of SEQ ID NO: 1312, or a pharmaceutically acceptable salt thereof.

[0398] Embodiment 134. A synthetic oligonucleotide comprising a nucleic acid sequence complementary to or sufficiently complementary to a region of a kallikrein-related peptidase 5 (KLK5) gene and/or to a region of a KLK5 gene product, wherein the nucleic acid sequence comprises, consists essentially of, or consists of SEQ ID NO: 3062, or a pharmaceutically acceptable salt thereof.

[0399] Embodiment 135. A synthetic oligonucleotide comprising a nucleic acid sequence complementary to or sufficiently complementary to a region of a kallikrein-related peptidase 5 (KLK5) gene and/or to a region of a KLK5 gene product, wherein the nucleic acid sequence comprises, consists essentially of, or consists of SEQ ID NO: 3063, or a pharmaceutically acceptable salt thereof.

[0400] Embodiment 136. A synthetic oligonucleotide comprising a nucleic acid sequence complementary to or sufficiently complementary to a region of a kallikrein-related peptidase 5 (KLK5) gene and/or to a region of a KLK5 gene product, wherein the nucleic acid sequence comprises, consists essentially of, or consists of SEQ ID NO: 3065, or a pharmaceutically acceptable salt thereof.

[0401] Embodiment 137. A synthetic oligonucleotide comprising a nucleic acid sequence complementary to or sufficiently complementary to a region of a kallikrein-related peptidase 5 (KLK5) gene and/or to a region of a KLK5 gene product, wherein the nucleic acid sequence comprises, consists essentially of, or consists of SEQ ID NO: 3069, or a pharmaceutically acceptable salt thereof.

[0402] Embodiment 138. A synthetic oligonucleotide comprising a nucleic acid sequence complementary to or sufficiently complementary to a region of a kallikrein-related peptidase 5 (KLK5) gene and/or to a region of a KLK5 gene product, wherein the nucleic acid sequence comprises, consists essentially of, or consists of SEQ ID NO: 3070, or a pharmaceutically acceptable salt thereof.

[0403] Embodiment 139. A synthetic oligonucleotide comprising a nucleic acid sequence complementary to or sufficiently complementary to a region of a kallikrein-related peptidase 5 (KLK5) gene and/or to a region of a KLK5 gene product, wherein the nucleic acid sequence comprises, consists essentially of, or consists of SEQ ID NO: 1343, or a pharmaceutically acceptable salt thereof.

[0404] Embodiment 140. A synthetic oligonucleotide comprising a nucleic acid sequence complementary to or sufficiently complementary to a region of a kallikrein-related peptidase 5 (KLK5) gene and/or to a region of a KLK5 gene product, wherein the nucleic acid sequence comprises, consists essentially of, or consists of SEQ ID NO: 1344, or a pharmaceutically acceptable salt thereof.

[0405] Embodiment 141. A synthetic oligonucleotide comprising a nucleic acid sequence complementary to or sufficiently complementary to a region of a kallikrein-related peptidase 5 (KLK5) gene and/or to a region of a KLK5 gene product, wherein the nucleic acid sequence comprises, consists essentially of, or consists of SEQ ID NO: 3071, or a pharmaceutically acceptable salt thereof.

[0406] Embodiment 142. A synthetic oligonucleotide comprising a nucleic acid sequence complementary to or sufficiently complementary to a region of a kallikrein-related peptidase 5 (KLK5) gene and/or to a region of a KLK5 gene product, wherein the nucleic acid sequence comprises, consists essentially of, or consists of SEQ ID NO: 3072, or a pharmaceutically acceptable salt thereof.

[0407] Embodiment 143. A synthetic oligonucleotide comprising a nucleic acid sequence complementary to or sufficiently complementary to a region of a kallikrein-related peptidase 5 (KLK5) gene and/or to a region of a KLK5 gene product, wherein the nucleic acid sequence comprises, consists essentially of, or consists of SEQ ID NO: 3091, or a pharmaceutically acceptable salt thereof.

[0408] Embodiment 144. A synthetic oligonucleotide comprising a nucleic acid sequence complementary to or sufficiently complementary to a region of a kallikrein-related peptidase 5 (KLK5) gene and/or to a region of a KLK5 gene product, wherein the nucleic acid sequence comprises, consists essentially of, or consists of SEQ ID NO: 3118, or a pharmaceutically acceptable salt thereof.

[0409] Embodiment 145. A synthetic oligonucleotide comprising a nucleic acid sequence complementary to or sufficiently complementary to a region of a kallikrein-related peptidase 5 (KLK5) gene and/or to a region of a KLK5 gene product, wherein the nucleic acid sequence comprises, consists essentially of, or consists of SEQ ID NO: 3178, or a pharmaceutically acceptable salt thereof.

[0410] Embodiment 146. A synthetic oligonucleotide comprising a nucleic acid sequence complementary to or sufficiently complementary to a region of a kallikrein-related peptidase 5 (KLK5) gene and/or to a region of a KLK5 gene product, wherein the nucleic acid sequence comprises, consists essentially of, or consists of SEQ ID NO: 3186, or a pharmaceutically acceptable salt thereof.

[0411] Embodiment 147. A synthetic oligonucleotide comprising a nucleic acid sequence complementary to or sufficiently complementary to a region of a kallikrein-related peptidase 5 (KLK5) gene and/or to a region of a KLK5 gene product, wherein the nucleic acid sequence comprises, consists essentially of, or consists of SEQ ID NO: 3187, or a pharmaceutically acceptable salt thereof.

[0412] Embodiment 148. A synthetic oligonucleotide comprising a nucleic acid sequence complementary to or sufficiently complementary to a region of a kallikrein-related peptidase 5 (KLK5) gene and/or to a region of a KLK5 gene product, wherein the nucleic acid sequence comprises, consists essentially of, or consists of SEQ ID NO: 2248, or a pharmaceutically acceptable salt thereof.

[0413] Embodiment 149. A synthetic oligonucleotide comprising a nucleic acid sequence complementary to or sufficiently complementary to a region of a kallikrein-related peptidase 7 (KLK7) gene and/or to a region of a KLK7 gene product, wherein the synthetic oligonucleotide comprises, consists essentially of, or consists of mCmGmAmGA*G*G*A*T*C*T*G*A*T*mGmUmG/iSp18//iSp18//3CholTEG/ (SEQ ID NO: 3449), or a pharmaceutically acceptable salt thereof.

[0414] Embodiment 150. A synthetic oligonucleotide comprising a nucleic acid sequence complementary to or sufficiently complementary to a region of a kallikrein-related peptidase 7 (KLK7) gene and/or to a region of a KLK7 gene product, wherein the synthetic oligonucleotide comprises, consists essentially of, or consists of mUmGmGmAG*C*T*G*A*T*T*G*C*C*mAmCmU/iSp18//iSp18//3CholTEG/ (SEQ ID NO: 3670), or a pharmaceutically acceptable salt thereof.

[0415] Embodiment 151. A synthetic oligonucleotide comprising a nucleic acid sequence complementary to or sufficiently complementary to a region of a kallikrein-related peptidase 7 (KLK7) gene and/or to a region of a KLK7 gene product, wherein the synthetic oligonucleotide comprises, consists essentially of, or consists of mCmCmGmCA*G*T*G*G*A*G*C*T*G*mAmUmU/iSp18//iSp18//3CholTEG/ (SEQ ID NO: 3676), or a pharmaceutically acceptable salt thereof.

[0416] Embodiment 152. A synthetic oligonucleotide comprising a nucleic acid sequence complementary to or sufficiently complementary to a region of a kallikrein-related peptidase 7 (KLK7) gene and/or to a region of a KLK7 gene product, wherein the synthetic oligonucleotide comprises, consists essentially of, or consists of mCmAmCmCC*A*G*C*G*C*T*C*A*T*mUmGmA/iSp18//iSp18//3CholTEG/ (SEQ ID NO: 3704), or a pharmaceutically acceptable salt thereof.

[0417] Embodiment 153. A synthetic oligonucleotide comprising a nucleic acid sequence complementary to or sufficiently complementary to a region of a kallikrein-related peptidase 7 (KLK7) gene and/or to a region of a KLK7 gene product, wherein the synthetic oligonucleotide comprises, consists essentially of, or consists of mGmAmGmCA*C*C*C*A*G*C*G*C*T*mCmAmU/iSp18//iSp18//3CholTEG/ (SEQ ID NO: 3707), or a pharmaceutically acceptable salt thereof.

[0418] Embodiment 154. A synthetic oligonucleotide comprising a nucleic acid sequence complementary to or sufficiently complementary to a region of a kallikrein-related peptidase 7 (KLK7) gene and/or to a region of a KLK7 gene product, wherein the synthetic oligonucleotide comprises, consists essentially of, or consists of mCmAmGmGT*G*C*A*C*G*G*T*G*T*mAmCmU/iSp18//iSp18//3CholTEG/ (SEQ ID NO: 3749), or a pharmaceutically acceptable salt thereof.

[0419] Embodiment 155. A synthetic oligonucleotide comprising a nucleic acid sequence complementary to or sufficiently complementary to a region of a kallikrein-related peptidase 7 (KLK7) gene and/or to a region of a KLK7 gene product, wherein the synthetic oligonucleotide comprises, consists essentially of, or consists of mGmCmCmCA*G*G*T*G*C*A*C*G*G*mUmGmU/iSp18//iSp18//3CholTEG/ (SEQ ID NO: 3752), or a pharmaceutically acceptable salt thereof.

[0420] Embodiment 156. A synthetic oligonucleotide comprising a nucleic acid sequence complementary to or sufficiently complementary to a region of a kallikrein-related peptidase 7 (KLK7) gene and/or to a region of a KLK7 gene product, wherein the synthetic oligonucleotide comprises, consists essentially of, or consists of mGmAmGmGT*C*A*G*A*G*G*G*A*A*mAmGmG/iSp18//iSp18//3CholTEG/ (SEQ ID NO: 3998), or a pharmaceutically acceptable salt thereof.

[0421] Embodiment 157. A synthetic oligonucleotide comprising a nucleic acid sequence complementary to or sufficiently complementary to a region of a kallikrein-related peptidase 7 (KLK7) gene and/or to a region of a KLK7 gene product, wherein the synthetic oligonucleotide comprises, consists essentially of, or consists of mUmCmCmCC*C*T*G*A*G*T*C*A*C*mCmAmU/iSp18//iSp18//3CholTEG/ (SEQ ID NO: 4130), or a pharmaceutically acceptable salt thereof.

[0422] Embodiment 158. A synthetic oligonucleotide comprising a nucleic acid sequence complementary to or sufficiently complementary to a region of a kallikrein-related peptidase 7 (KLK7) gene and/or to a region of a KLK7 gene product, wherein the synthetic oligonucleotide comprises, consists essentially of, or consists of mGmGmAmGG*C*T*G*A*A*G*C*A*C*mGmAmG/iSp18//iSp18//3CholTEG/ (SEQ ID NO: 4868), or a pharmaceutically acceptable salt thereof.

[0423] Embodiment 159. A synthetic oligonucleotide comprising a nucleic acid sequence complementary to or sufficiently complementary to a region of a kallikrein-related peptidase 7 (KLK7) gene and/or to a region of a KLK7 gene product, wherein the synthetic oligonucleotide comprises, consists essentially of, or consists of mUmUmGmGG*A*G*G*C*C*A*A*G*G*mUmGmG/iSp18//iSp18//3CholTEG/ (SEQ ID NO: 5009), or a pharmaceutically acceptable salt thereof.

[0424] Embodiment 160. A synthetic oligonucleotide comprising a nucleic acid sequence complementary to or sufficiently complementary to a region of a kallikrein-related peptidase 7 (KLK7) gene and/or to a region of a KLK7 gene product, wherein the synthetic oligonucleotide comprises, consists essentially of, or consists of mUmGmUmAA*T*C*C*C*A*G*C*A*C*mUmUmU/iSp18//iSp18//3CholTEG/ (SEQ ID NO: 5024), or a pharmaceutically acceptable salt thereof.

[0425] Embodiment 161. A synthetic oligonucleotide comprising a nucleic acid sequence complementary to or sufficiently complementary to a region of a kallikrein-related peptidase 7 (KLK7) gene and/or to a region of a KLK7 gene product, wherein the synthetic oligonucleotide comprises, consists essentially of, or consists of mCmCmUmGT*A*A*T*C*C*C*A*G*C*mAmCmU/iSp18//iSp18//3CholTEG/ (SEQ ID NO: 5026), or a pharmaceutically acceptable salt thereof.

[0426] Embodiment 162. A synthetic oligonucleotide comprising a nucleic acid sequence complementary to or sufficiently complementary to a region of a kallikrein-related peptidase 7 (KLK7) gene and/or to a region of a KLK7gene product, wherein the synthetic oligonucleotide comprises, consists essentially of, or consists of mGmCmGmAmGmGmAmCmCmAmGmAmAmGmGmGmC/iSp18//iSp18//3CholTEG/ (SEQ ID NO: 5376), or a pharmaceutically acceptable salt thereof.

[0427] Embodiment 163. A synthetic oligonucleotide comprising a nucleic acid sequence complementary to or sufficiently complementary to a region of a kallikrein-related peptidase 7 (KLK7) gene and/or to a region of a KLK7 gene product, wherein the synthetic oligonucleotide comprises, consists essentially of, or consists of mAmGmGmGmAmGmAmGmCmUmGmUmCmAmGmUmC/iSp18//iSp18//3CholTEG/ (SEQ ID NO: 5406), or a pharmaceutically acceptable salt thereof.

[0428] Embodiment 164. A synthetic oligonucleotide comprising a nucleic acid sequence complementary to or sufficiently complementary to a region of a kallikrein-related peptidase 7 (KLK7) gene and/or to a region of a KLK7 gene product, wherein the synthetic oligonucleotide comprises, consists essentially of, or consists of mGmGmAmGmCmAmGmGmGmAmGmAmGmCmUmGmU/iSp18//iSp18//3CholTEG/ (SEQ ID NO: 5411), or a pharmaceutically acceptable salt thereof.

[0429] Embodiment 165. A synthetic oligonucleotide comprising a nucleic acid sequence complementary to or sufficiently complementary to a region of a kallikrein-related peptidase 7 (KLK7) gene and/or to a region of a KLK7 gene product, wherein the synthetic oligonucleotide comprises, consists essentially of, or consists of mAmGmGmAmGmCmAmGmGmGmAmGmAmGmCmUmG/iSp18//iSp18//3CholTEG/ (SEQ ID NO: 5412), or a pharmaceutically acceptable salt thereof.

[0430] Embodiment 166. A synthetic oligonucleotide comprising a nucleic acid sequence complementary to or sufficiently complementary to a region of a kallikrein-related peptidase 7 (KLK7) gene and/or to a region of a KLK7 gene product, wherein the synthetic oligonucleotide comprises, consists essentially of, or consists of mGmGmUmCmAmCmUmGmCmAmGmGmGmAmGmGmA/iSp18//iSp18//3CholTEG/ (SEQ ID NO: 5425), or a pharmaceutically acceptable salt thereof.

[0431] Embodiment 167. A synthetic oligonucleotide comprising a nucleic acid sequence complementary to or sufficiently complementary to a region of a kallikrein-related peptidase 7 (KLK7) gene and/or to a region of a KLK7 gene product, wherein the synthetic oligonucleotide comprises, consists essentially of, or consists of mAmAmAmGmGmUmCmAmCmUmGmCmAmGmGmGmA/iSp18//iSp18//3CholTEG/ (SEQ ID NO: 5428), or a pharmaceutically acceptable salt thereof.

[0432] Embodiment 168. A synthetic oligonucleotide comprising a nucleic acid sequence complementary to or sufficiently complementary to a region of a kallikrein-related peptidase 7 (KLK7) gene and/or to a region of a KLK7 gene product, wherein the synthetic oligonucleotide comprises, consists essentially of, or consists of mGmGmGmAmAmAmGmGmUmCmAmCmUmGmCmAmG/iSp18//iSp18//3CholTEG/ (SEQ ID NO: 5431), or a pharmaceutically acceptable salt thereof.

[0433] Embodiment 169. A synthetic oligonucleotide comprising a nucleic acid sequence complementary to or sufficiently complementary to a region of a kallikrein-related peptidase 7 (KLK7) gene and/or to a region of a KLK7 gene product, wherein the synthetic oligonucleotide comprises, consists essentially of, or consists of mAmGmAmGmGmGmAmAmAmGmGmUmCmAmCmUmG/iSp18//iSp18//3CholTEG/ (SEQ ID NO: 5434), or a pharmaceutically acceptable salt thereof.

[0434] Embodiment 170. A synthetic oligonucleotide comprising a nucleic acid sequence complementary to or sufficiently complementary to a region of a kallikrein-related peptidase 7 (KLK7) gene and/or to a region of a KLK7 gene product, wherein the synthetic oligonucleotide comprises, consists essentially of, or consists of mGmGmUmCmAmGmAmGmGmGmAmAmAmGmGmUmC/iSp18//iSp18//3CholTEG/ (SEQ ID NO: 3996), or a pharmaceutically acceptable salt thereof.

[0435] Embodiment 171. A synthetic oligonucleotide comprising a nucleic acid sequence complementary to or sufficiently complementary to a region of a kallikrein-related peptidase 7 (KLK7) gene and/or to a region of a KLK7 gene product, wherein the synthetic oligonucleotide comprises, consists essentially of, or consists of mAmGmGmUmCmAmGmAmGmGmGmAmAmAmGmGmU/iSp18//iSp18//3CholTEG/ (SEQ ID NO: 3997), or a pharmaceutically acceptable salt thereof.

[0436] Embodiment 172. A synthetic oligonucleotide comprising a nucleic acid sequence complementary to or sufficiently complementary to a region of a kallikrein-related peptidase 7 (KLK7) gene and/or to a region of a KLK7 gene product, wherein the synthetic oligonucleotide comprises, consists essentially of, or consists of mGmAmGmGmUmCmAmGmAmGmGmGmAmAmAmGmG/iSp18//iSp18//3CholTEG/ (SEQ ID NO: 5437), or a pharmaceutically acceptable salt thereof.

[0437] Embodiment 173. A synthetic oligonucleotide comprising a nucleic acid sequence complementary to or sufficiently complementary to a region of a kallikrein-related peptidase 7 (KLK7) gene and/or to a region of a KLK7 gene product, wherein the synthetic oligonucleotide comprises, consists essentially of, or consists of mUmGmAmGmGmUmCmAmGmAmGmGmGmAmAmAmG/iSp18//iSp18//3CholTEG/ (SEQ ID NO: 5438), or a pharmaceutically acceptable salt thereof.

[0438] Embodiment 174. A synthetic oligonucleotide comprising a nucleic acid sequence complementary to or sufficiently complementary to a region of a kallikrein-related peptidase 7 (KLK7) gene and/or to a region of a KLK7 gene product, wherein the synthetic oligonucleotide comprises, consists essentially of, or consists of mGmCmAmCmAmUmGmAmGmGmUmCmAmGmAmGmG/iSp18//iSp18//3CholTEG/ (SEQ ID NO: 5443), or a pharmaceutically acceptable salt thereof.

[0439] Embodiment 175. A synthetic oligonucleotide comprising a nucleic acid sequence complementary to or sufficiently complementary to a region of a kallikrein-related peptidase 7 (KLK7) gene and/or to a region of a KLK7 gene product, wherein the synthetic oligonucleotide comprises, consists essentially of, or consists of mCmGmCmAmCmAmUmGmAmGmGmUmCmAmGmAmG/iSp18//iSp18//3CholTEG/ (SEQ ID NO: 5444), or a pharmaceutically acceptable salt thereof.

[0440] Embodiment 176. A synthetic oligonucleotide comprising a nucleic acid sequence complementary to or sufficiently complementary to a region of a kallikrein-related peptidase 7 (KLK7) gene and/or to a region of a KLK7 gene product, wherein the synthetic oligonucleotide comprises, consists essentially of, or consists of mAmCmGmCmAmCmAmUmGmAmGmGmUmCmAmGmA/iSp18//iSp18//3CholTEG/ (SEQ ID NO: 5445), or a pharmaceutically acceptable salt thereof.

[0441] Embodiment 177. A synthetic oligonucleotide comprising a nucleic acid sequence complementary to or sufficiently complementary to a region of a kallikrein-related peptidase 7 (KLK7) gene and/or to a region of a KLK7 gene product, wherein the synthetic oligonucleotide comprises, consists essentially of, or consists of mCmAmCmGmCmAmCmAmUmGmAmGmGmUmCmAmG/iSp18//iSp18//3CholTEG/ (SEQ ID NO: 5446), or a pharmaceutically acceptable salt thereof.

[0442] Embodiment 178. A synthetic oligonucleotide comprising a nucleic acid sequence complementary to or sufficiently complementary to a region of a kallikrein-related peptidase 7 (KLK7) gene and/or to a region of a KLK7 gene product, wherein the synthetic oligonucleotide comprises, consists essentially of, or consists of mCmCmAmCmGmCmAmCmAmUmGmAmGmGmUmCmA/iSp18//iSp18//3CholTEG/ (SEQ ID NO: 5447), or a pharmaceutically acceptable salt thereof.

[0443] Embodiment 179. A synthetic oligonucleotide comprising a nucleic acid sequence complementary to or sufficiently complementary to a region of a kallikrein-related peptidase 7 (KLK7) gene and/or to a region of a KLK7 gene product, wherein the synthetic oligonucleotide comprises, consists essentially of, or consists of mUmCmCmAmCmGmCmAmCmAmUmGmAmGmGmUmC/iSp18//iSp18//3CholTEG/ (SEQ ID NO: 5448), or a pharmaceutically acceptable salt thereof.

[0444] Embodiment 180. A synthetic oligonucleotide comprising a nucleic acid sequence complementary to or sufficiently complementary to a region of a kallikrein-related peptidase 7 (KLK7) gene and/or to a region of a KLK7 gene product, wherein the synthetic oligonucleotide comprises, consists essentially of, or consists of mUmUmGmAmCmAmUmCmCmAmCmGmCmAmCmAmU/iSp18//iSp18//3CholTEG/ (SEQ ID NO: 5454), or a pharmaceutically acceptable salt thereof.

[0445] Embodiment 181. A synthetic oligonucleotide comprising a nucleic acid sequence complementary to or sufficiently complementary to a region of a kallikrein-related peptidase 7 (KLK7) gene and/or to a region of a KLK7 gene product, wherein the synthetic oligonucleotide comprises, consists essentially of, or consists of mGmCmGmUmUmUmUmUmCmUmUmGmGmAmGmUmC/iSp18//iSp18//3CholTEG/ (SEQ ID NO: 5542), or a pharmaceutically acceptable salt thereof.

[0446] Embodiment 182. A synthetic oligonucleotide comprising a nucleic acid sequence complementary to or sufficiently complementary to a region of a kallikrein-related peptidase 7 (KLK7) gene and/or to a region of a KLK7 gene product, wherein the synthetic oligonucleotide comprises, consists essentially of, or consists of mUmAmCmCmCmAmGmGmAmCmUmGmGmGmGmAmG/iSp18//iSp18//3CholTEG/ (SEQ ID NO: 5588), or a pharmaceutically acceptable salt thereof.

[0447] Embodiment 183. A synthetic oligonucleotide comprising a nucleic acid sequence complementary to or sufficiently complementary to a region of a kallikrein-related peptidase 7 (KLK7) gene and/or to a region of a KLK7 gene product, wherein the nucleic acid sequence comprises, consists essentially of, or consists of SEQ ID NO: 5687, or a pharmaceutically acceptable salt thereof.

[0448] Embodiment 184. A synthetic oligonucleotide comprising a nucleic acid sequence complementary to or sufficiently complementary to a region of a kallikrein-related peptidase 7 (KLK7) gene and/or to a region of a KLK7 gene product, wherein the nucleic acid sequence comprises, consists essentially of, or consists of SEQ ID NO: 5879, or a pharmaceutically acceptable salt thereof.

[0449] Embodiment 185. A synthetic oligonucleotide comprising a nucleic acid sequence complementary to or sufficiently complementary to a region of a kallikrein-related peptidase 7 (KLK7) gene and/or to a region of a KLK7 gene product, wherein the nucleic acid sequence comprises, consists essentially of, or consists of SEQ ID NO: 5885, or a pharmaceutically acceptable salt thereof.

[0450] Embodiment 186. A synthetic oligonucleotide comprising a nucleic acid sequence complementary to or sufficiently complementary to a region of a kallikrein-related peptidase 7 (KLK7) gene and/or to a region of a KLK7 gene product, wherein the nucleic acid sequence comprises, consists essentially of, or consists of SEQ ID NO: 5901, or a pharmaceutically acceptable salt thereof.

[0451] Embodiment 187. A synthetic oligonucleotide comprising a nucleic acid sequence complementary to or sufficiently complementary to a region of a kallikrein-related peptidase 7 (KLK7) gene and/or to a region of a KLK7 gene product, wherein the nucleic acid sequence comprises, consists essentially of, or consists of SEQ ID NO: 5904, or a pharmaceutically acceptable salt thereof.

[0452] Embodiment 188. A synthetic oligonucleotide comprising a nucleic acid sequence complementary to or sufficiently complementary to a region of a kallikrein-related peptidase 7 (KLK7) gene and/or to a region of a KLK7 gene product, wherein the nucleic acid sequence comprises, consists essentially of, or consists of SEQ ID NO: 5940, or a pharmaceutically acceptable salt thereof.

[0453] Embodiment 189. A synthetic oligonucleotide comprising a nucleic acid sequence complementary to or sufficiently complementary to a region of a kallikrein-related peptidase 7 (KLK7) gene and/or to a region of a KLK7 gene product, wherein the nucleic acid sequence comprises, consists essentially of, or consists of SEQ ID NO: 5943, or a pharmaceutically acceptable salt thereof.

[0454] Embodiment 190. A synthetic oligonucleotide comprising a nucleic acid sequence complementary to or sufficiently complementary to a region of a kallikrein-related peptidase 7 (KLK7) gene and/or to a region of a KLK7 gene product, wherein the nucleic acid sequence comprises, consists essentially of, or consists of SEQ ID NO: 3998, or a pharmaceutically acceptable salt thereof. Embodiment 191. A synthetic oligonucleotide comprising a nucleic acid sequence complementary to or sufficiently complementary to a region of a kallikrein-related peptidase 7 (KLK7) gene and/or to a region of a KLK7 gene product, wherein the nucleic acid sequence comprises, consists essentially of, or consists of SEQ ID NO: 6267, or a pharmaceutically acceptable salt thereof.

[0455] Embodiment 192. A synthetic oligonucleotide comprising a nucleic acid sequence complementary to or sufficiently complementary to a region of a kallikrein-related peptidase 7 (KLK7) gene and/or to a region of a KLK7 gene product, wherein the nucleic acid sequence comprises, consists essentially of, or consists of SEQ ID NO: 4868, or a pharmaceutically acceptable salt thereof.

[0456] Embodiment 193. A synthetic oligonucleotide comprising a nucleic acid sequence complementary to or sufficiently complementary to a region of a kallikrein-related peptidase 7 (KLK7) gene and/or to a region of a KLK7 gene product, wherein the nucleic acid sequence comprises, consists essentially of, or consists of SEQ ID NO: 7060, or a pharmaceutically acceptable salt thereof.

[0457] Embodiment 194. A synthetic oligonucleotide comprising a nucleic acid sequence complementary to or sufficiently complementary to a region of a kallikrein-related peptidase 7 (KLK7) gene and/or to a region of a KLK7 gene product, wherein the nucleic acid sequence comprises, consists essentially of, or consists of SEQ ID NO: 7070, or a pharmaceutically acceptable salt thereof.

[0458] Embodiment 195. A synthetic oligonucleotide comprising a nucleic acid sequence complementary to or sufficiently complementary to a region of a kallikrein-related peptidase 7 (KLK7) gene and/or to a region of a KLK7 gene product, wherein the nucleic acid sequence comprises, consists essentially of, or consists of SEQ ID NO: 7072, or a pharmaceutically acceptable salt thereof.

[0459] Embodiment 196. A synthetic oligonucleotide comprising a nucleic acid sequence complementary to or sufficiently complementary to a region of a kallikrein-related peptidase 7 (KLK7) gene and/or to a region of a KLK7 gene product, wherein the nucleic acid sequence comprises, consists essentially of, or consists of SEQ ID NO: 5376, or a pharmaceutically acceptable salt thereof.

[0460] Embodiment 197. A synthetic oligonucleotide comprising a nucleic acid sequence complementary to or sufficiently complementary to a region of a kallikrein-related peptidase 7 (KLK7) gene and/or to a region of a KLK7 gene product, wherein the nucleic acid sequence comprises, consists essentially of, or consists of SEQ ID NO: 7417, or a pharmaceutically acceptable salt thereof.

[0461] Embodiment 198. A synthetic oligonucleotide comprising a nucleic acid sequence complementary to or sufficiently complementary to a region of a kallikrein-related peptidase 7 (KLK7) gene and/or to a region of a KLK7 gene product, wherein the nucleic acid sequence comprises, consists essentially of, or consists of SEQ ID NO: 7422, or a pharmaceutically acceptable salt thereof.

[0462] Embodiment 199. A synthetic oligonucleotide comprising a nucleic acid sequence complementary to or sufficiently complementary to a region of a kallikrein-related peptidase 7 (KLK7) gene and/or to a region of a KLK7 gene product, wherein the nucleic acid sequence comprises, consists essentially of, or consists of SEQ ID NO: 7423, or a pharmaceutically acceptable salt thereof.

[0463] Embodiment 200. A synthetic oligonucleotide comprising a nucleic acid sequence complementary to or sufficiently complementary to a region of a kallikrein-related peptidase 7 (KLK7) gene and/or to a region of a KLK7 gene product, wherein the nucleic acid sequence comprises, consists essentially of, or consists of SEQ ID NO: 7431, or a pharmaceutically acceptable salt thereof.

[0464] Embodiment 201. A synthetic oligonucleotide comprising a nucleic acid sequence complementary to or sufficiently complementary to a region of a kallikrein-related peptidase 7 (KLK7) gene and/or to a region of a KLK7 gene product, wherein the nucleic acid sequence comprises, consists essentially of, or consists of SEQ ID NO: 7434, or a pharmaceutically acceptable salt thereof.

[0465] Embodiment 202. A synthetic oligonucleotide comprising a nucleic acid sequence complementary to or sufficiently complementary to a region of a kallikrein-related peptidase 7 (KLK7) gene and/or to a region of a KLK7 gene product, wherein the nucleic acid sequence comprises, consists essentially of, or consists of SEQ ID NO: 7437, or a pharmaceutically acceptable salt thereof.

[0466] Embodiment 203. A synthetic oligonucleotide comprising a nucleic acid sequence complementary to or sufficiently complementary to a region of a kallikrein-related peptidase 7 (KLK7) gene and/or to a region of a KLK7 gene product, wherein the nucleic acid sequence comprises, consists essentially of, or consists of SEQ ID NO: 7440, or a pharmaceutically acceptable salt thereof.

[0467] Embodiment 204. A synthetic oligonucleotide comprising a nucleic acid sequence complementary to or sufficiently complementary to a region of a kallikrein-related peptidase 7 (KLK7) gene and/or to a region of a KLK7 gene product, wherein the nucleic acid sequence comprises, consists essentially of, or consists of SEQ ID NO: 6153, or a pharmaceutically acceptable salt thereof.

[0468] Embodiment 205. A synthetic oligonucleotide comprising a nucleic acid sequence complementary to or sufficiently complementary to a region of a kallikrein-related peptidase 7 (KLK7) gene and/or to a region of a KLK7 gene product, wherein the nucleic acid sequence comprises, consists essentially of, or consists of SEQ ID NO: 6154, or a pharmaceutically acceptable salt thereof.

[0469] Embodiment 206. A synthetic oligonucleotide comprising a nucleic acid sequence complementary to or sufficiently complementary to a region of a kallikrein-related peptidase 7 (KLK7) gene and/or to a region of a KLK7 gene product, wherein the nucleic acid sequence comprises, consists essentially of, or consists of SEQ ID NO: 3998, or a pharmaceutically acceptable salt thereof.

[0470] Embodiment 207. A synthetic oligonucleotide comprising a nucleic acid sequence complementary to or sufficiently complementary to a region of a kallikrein-related peptidase 7 (KLK7) gene and/or to a region of a KLK7 gene product, wherein the nucleic acid sequence comprises, consists essentially of, or consists of SEQ ID NO: 6155, or a pharmaceutically acceptable salt thereof.

[0471] Embodiment 208. A synthetic oligonucleotide comprising a nucleic acid sequence complementary to or sufficiently complementary to a region of a kallikrein-related peptidase 7 (KLK7) gene and/or to a region of a KLK7 gene product, wherein the nucleic acid sequence comprises, consists essentially of, or consists of SEQ ID NO: 4004, or a pharmaceutically acceptable salt thereof.

[0472] Embodiment 209. A synthetic oligonucleotide comprising a nucleic acid sequence complementary to or sufficiently complementary to a region of a kallikrein-related peptidase 7 (KLK7) gene and/or to a region of a KLK7 gene product, wherein the nucleic acid sequence comprises, consists essentially of, or consists of SEQ ID NO: 4005, or a pharmaceutically acceptable salt thereof.

[0473] Embodiment 210. A synthetic oligonucleotide comprising a nucleic acid sequence complementary to or sufficiently complementary to a region of a kallikrein-related peptidase 7 (KLK7) gene and/or to a region of a KLK7 gene product, wherein the nucleic acid sequence comprises, consists essentially of, or consists of SEQ ID NO: 4006, or a pharmaceutically acceptable salt thereof.

[0474] Embodiment 211. A synthetic oligonucleotide comprising a nucleic acid sequence complementary to or sufficiently complementary to a region of a kallikrein-related peptidase 7 (KLK7) gene and/or to a region of a KLK7 gene product, wherein the nucleic acid sequence comprises, consists essentially of, or consists of SEQ ID NO: 4007, or a pharmaceutically acceptable salt thereof.

[0475] Embodiment 212. A synthetic oligonucleotide comprising a nucleic acid sequence complementary to or sufficiently complementary to a region of a kallikrein-related peptidase 7 (KLK7) gene and/or to a region of a KLK7 gene product, wherein the nucleic acid sequence comprises, consists essentially of, or consists of SEQ ID NO: 6159, or a pharmaceutically acceptable salt thereof.

[0476] Embodiment 213. A synthetic oligonucleotide comprising a nucleic acid sequence complementary to or sufficiently complementary to a region of a kallikrein-related peptidase 7 (KLK7) gene and/or to a region of a KLK7 gene product, wherein the nucleic acid sequence comprises, consists essentially of, or consists of SEQ ID NO: 6160, or a pharmaceutically acceptable salt thereof.

[0477] Embodiment 214. A synthetic oligonucleotide comprising a nucleic acid sequence complementary to or sufficiently complementary to a region of a kallikrein-related peptidase 7 (KLK7) gene and/or to a region of a KLK7 gene product, wherein the nucleic acid sequence comprises, consists essentially of, or consists of SEQ ID NO: 6166, or a pharmaceutically acceptable salt thereof.

[0478] Embodiment 215. A synthetic oligonucleotide comprising a nucleic acid sequence complementary to or sufficiently complementary to a region of a kallikrein-related peptidase 7 (KLK7) gene and/or to a region of a KLK7 gene product, wherein the nucleic acid sequence comprises, consists essentially of, or consists of SEQ ID NO: 7516, or a pharmaceutically acceptable salt thereof.

[0479] Embodiment 216. A spherical nucleic acid (SNA) comprising a core and an oligonucleotide shell, wherein the oligonucleotide comprises a first synthetic oligonucleotide complementary to or sufficiently complementary to a region of a first kallikrein-related peptidase (KK) gene and/or to a region of a first KLK gene product, and a second synthetic oligonucleotide complementary to or sufficiently complementary to a region of a second KLK gene and/or to a region of a second KLK gene product, wherein the first region and the second region of the KLK gene and/or the KLK gene product are within the same intron, exon, 3′-untranslated region (UTR), or 5′-UTR.

[0480] Embodiment 217. A spherical nucleic acid (SNA) comprising a core and an oligonucleotide shell, wherein the oligonucleotide comprises a first synthetic oligonucleotide complementary to or sufficiently complementary to a region of a first kallikrein-related peptidase (KLK) gene and/or to a region of a first KLK gene product, and a second synthetic oligonucleotide complementary to or sufficiently complementary to a region of a second KLK gene and/or to a region of a second KLK gene product, wherein the first region and the second region in the KLK gene and/or the KLK gene product are not within the same intron, exon, 3′-untranslated region (UTR), or 5′-UTR.

[0481] Embodiment 218. A spherical nucleic acid (SNA) comprising a core and an oligonucleotide shell, wherein the oligonucleotide comprises a first synthetic oligonucleotide complementary to or sufficiently complementary to a region of a first kallikrein-related peptidase (KLK) gene and/or to a region of a first KLK gene product, and a second synthetic oligonucleotide complementary to or sufficiently complementary to a region of a second KLK gene and/or to a region of a second KLK gene product, wherein the first region is within an exon.

[0482] Embodiment 219. A spherical nucleic acid (SNA) comprising a core and an oligonucleotide shell, wherein the oligonucleotide comprises a first synthetic oligonucleotide complementary to or sufficiently complementary to a region of a first kallikrein-related peptidase (KLK) gene and/or to a region of a first KLK gene product, and a second synthetic oligonucleotide complementary to or sufficiently complementary to a region of a second KLK gene and/or to a region of a second KLK gene product, wherein the second region is within an exon.

[0483] Embodiment 220. A spherical nucleic acid (SNA) comprising a core and an oligonucleotide shell, wherein the oligonucleotide comprises a first synthetic oligonucleotide complementary to or sufficiently complementary to a region of a first kallikrein-related peptidase (KLK) gene and/or to a region of a first KLK gene product, and a second synthetic oligonucleotide complementary to or sufficiently complementary to a region of a second KLK gene and/or to a region of a second KLK gene product, wherein the first region is within a 3′- or 5′-untranslated region (3′-UTR or 5′-UTR).

[0484] Embodiment 221. A spherical nucleic acid (SNA) comprising a core and an oligonucleotide shell, wherein the oligonucleotide comprises a first synthetic oligonucleotide complementary to or sufficiently complementary to a region of a first kallikrein-related peptidase (KLK) gene and/or to a region of a first KLK gene product, and a second synthetic oligonucleotide complementary to or sufficiently complementary to a region of a second KLK gene and/or to a region of a second KLK gene product, wherein the second region is within a 3′-UTR or 5′-UTR.

[0485] Embodiment 222. A spherical nucleic acid (SNA) comprising a core and an oligonucleotide shell, wherein the oligonucleotide comprises a first synthetic oligonucleotide complementary to or sufficiently complementary to a region of a first kallikrein-related peptidase (KLK) gene and/or to a region of a first KLK gene product, and a second synthetic oligonucleotide complementary to or sufficiently complementary to a region of a second KLK gene and/or to a region of a second KLK gene product, wherein the first region is within an intron.

[0486] Embodiment 223. A spherical nucleic acid (SNA) comprising a core and an oligonucleotide shell, wherein the oligonucleotide comprises a first synthetic oligonucleotide complementary to or sufficiently complementary to a region of a first kallikrein-related peptidase (KLK) gene and/or to a region of a first KLK gene product, and a second synthetic oligonucleotide complementary to or sufficiently complementary to a region of a second KLK gene and/or to a region of a second KLK gene product, wherein the second region is within an intron.

[0487] Embodiment 224. A pharmaceutical composition comprising:
[0488] a first spherical nucleic acid (SNA) that comprises a core and an oligonucleotide shell, wherein the oligonucleotide shell comprises a first synthetic oligonucleotide comprising a first nucleic acid sequence complementary to or sufficiently complementary to a region of a first kallikrein-related peptidase (KLK) gene and/or to a region of a first KLK gene product, and a second SNA that comprises a core and an oligonucleotide shell, wherein the oligonucleotide shell comprises a second synthetic oligonucleotide comprising a second nucleic acid sequence complementary to or sufficiently complementary to a region of a second KLK gene and/or to a region of a second KLK gene product.

[0489] Embodiment 225. The pharmaceutical composition of Embodiment 224, wherein the first KLK gene is a KLK5 gene.

[0490] Embodiment 226. The pharmaceutical composition of Embodiment 224, wherein the first KLK gene product is a KLK5 gene product.

[0491] Embodiment 227. The pharmaceutical composition of Embodiment 224, wherein the second KLK gene is a KLK7 gene.

[0492] Embodiment 228. The pharmaceutical composition of Embodiment 224, wherein the second KLK gene product is a KLK7 gene product.

[0493] Embodiment 229. A synthetic oligonucleotide comprising a nucleic acid sequence complementary to or sufficiently complementary to a region of a kallikrein-related peptidase 5 (KLK5) gene and/or to a region of a KLK5 gene product, wherein the nucleic acid sequence comprises, consists essentially of, or consists of any one of SEQ ID NOs: 1-3302, and/or the synthetic oligonucleotide comprises, consists essentially of, or consists of a synthetic oligonucleotide provided in Table 1, or a pharmaceutically acceptable salt thereof.

[0494] Embodiment 230. A synthetic oligonucleotide comprising a nucleic acid sequence complementary to or sufficiently complementary to a region of a kallikrein-related peptidase 7 (KLK7) gene and/or to a region of a KLK7 gene product, or a pharmaceutically acceptable salt thereof.

[0495] Embodiment 231. The synthetic oligonucleotide of embodiment 230, wherein the nucleic acid sequence comprises, consists essentially of, or consists of any one of SEQ ID NOs: 3401-7574, and/or the synthetic oligonucleotide comprises, consists essentially of, or consists of a synthetic oligonucleotide provided in Table 2, or a pharmaceutically acceptable salt thereof.

[0496] Embodiment 232. The synthetic oligonucleotide of embodiment 229, wherein the nucleic acid sequence comprises, consists essentially of, or consists of any one of SEQ ID NO: 99, SEQ ID NO: 109, SEQ ID NO: 112, SEQ ID NO: 113, SEQ ID NO: 114, SEQ ID NO: 315, SEQ ID NO: 403, SEQ ID NO: 434, SEQ ID NO: 465, SEQ ID NO: 516, SEQ ID NO: 596, SEQ ID NO: 614, SEQ ID NO: 829, SEQ ID NO: 830, SEQ ID NO: 831, SEQ iD NO: 852, SEQ ID NO: 856, SEQ ID NO: 875, SEQ ID NO: 876, SEQ ID NO: 878, SEQ ID NO: 879, SEQ ID NO: 891, SEQ ID NO: 901, SEQ ID NO: 905, SEQ ID NO: 908, SEQ ID NO: 909, SEQ ID NO: 912, SEQ ID NO: 913, SEQ ID NO: 954, SEQ ID NO: 980, SEQ ID NO: 1030, SEQ ID NO: 1079, SEQ ID NO: 1135, SEQ ID NO: 1147, SEQ ID NO: 1148, SEQ ID NO: 1154, SEQ ID NO: 1155, SEQ ID NO: 1156, SEQ ID NO: 1157, SEQ ID NO: 1161, SEQ ID NO: 1162, SEQ ID NO: 1163, SEQ ID NO: 1165, SEQ ID NO: 1166, SEQ ID NO: 1174, SEQ ID NO: 1189, SEQ ID NO: 1248, SEQ ID NO: 1259, SEQ ID NO: 1262, SEQ ID NO: 1265, SEQ ID NO: 1266, SEQ ID NO: 1267, SEQ ID NO: 1269, SEQ ID NO: 1275, SEQ ID NO: 1277, SEQ ID NO: 1278, SEQ ID NO: 1279, SEQ ID NO: 1292, SEQ ID NO: 1312, SEQ ID NO: 1334, SEQ ID NO: 1335, SEQ ID NO: 1337, SEQ ID NO: 1341, SEQ ID NO: 1342, SEQ ID NO: 1343, SEQ ID NO: 1344, SEQ ID NO: 1345, SEQ ID NO: 1346, SEQ ID NO: 1368, SEQ ID NO: 1397, SEQ ID NO: 1466, SEQ ID NO: 1474, SEQ ID NO: 1475, SEQ ID NO: 1624, SEQ ID NO: 1997, SEQ ID NO: 2007, SEQ ID NO: 2010, SEQ ID NO: 2011, SEQ ID NO: 2012, SEQ ID NO: 2173, SEQ ID NO: 2241, SEQ ID NO: 2269, SEQ ID NO: 465, SEQ ID NO: 2343, SEQ ID NO: 2412, SEQ ID NO: 2429, SEQ ID NO: 2624, SEQ ID NO: 2625, SEQ ID NO: 2626, SEQ ID NO: 2641, SEQ ID NO: 856, SEQ ID NO: 2660, SEQ ID NO: 2661, SEQ ID NO: 2663, SEQ ID NO: 2664, SEQ ID NO: 2675, SEQ ID NO: 2685, SEQ ID NO: 2689, SEQ ID NO: 2692, SEQ ID NO: 2693, SEQ ID NO: 2696, SEQ ID NO: 2697, SEQ ID NO: 2736, SEQ ID NO: 2762, SEQ ID NO: 2807, SEQ ID NO: 2840, SEQ ID NO: 2883, SEQ ID NO: 2895, SEQ ID NO: 2896, SEQ ID NO: 2902, SEQ ID NO: 2903, SEQ ID NO: 2904, SEQ ID NO: 2905, SEQ ID NO: 2909, SEQ ID NO: 2910, SEQ ID NO: 2911, SEQ ID NO: 2913, SEQ ID NO: 2914, SEQ ID NO: 2922, SEQ ID NO: 2937, SEQ ID NO: 2991, SEQ ID NO: 3002, SEQ ID NO: 3005, SEQ ID NO: 3008, SEQ ID NO: 3009, SEQ ID NO: 3010, SEQ ID NO: 3012, SEQ ID NO: 3017, SEQ ID NO: 3019, SEQ ID NO: 3020, SEQ ID NO: 3021, SEQ ID NO: 3033, SEQ ID NO: 1312, SEQ ID NO: 3062, SEQ ID NO: 3063, SEQ ID NO: 3065, SEQ ID NO: 3069, SEQ ID NO: 3070, SEQ ID NO: 1343, SEQ ID NO: 1344, SEQ ID NO: 3071, SEQ ID NO: 3072, SEQ ID NO: 3091, SEQ ID NO: 3118, SEQ ID NO: 3178, SEQ ID NO: 3186, SEQ ID NO: 3187, or SEQ ID NO: 2248, and/or wherein the synthetic oligonucleotide comprises, consists essentially of, or consists of any one of

(SEQ ID NO: 99)
mCmUmGmAmGC*C*A*C*C*C*T*C*A*C*mCmAmGmGmU/iSp18//iSp18//3CholTEG/,
(SEQ ID NO: 109)
mUmCmCmCmUG*C*C*T*G*C*T*G*A*G*mCmCmAmCmC/iSp18//iSp18//3CholTEG/,
(SEQ ID NO: 112)
mCmCmUmUmCC*C*T*G*C*C*T*G*C*T*mGmAmGmCmC/iSp18//iSp18//3CholTEG/,
(SEQ ID NO: 113)
mUmCmCmUmUC*C*C*T*G*C*C*T*G*C*mUmGmAmGmC/iSp18//iSp18//3CholTEG/,
(SEQ ID NO: 114)
mCmUmCmCmUT*C*C*C*T*G*C*C*T*G*mCmUmGmAmG/iSp18//iSp18//3CholTEG/,
(SEQ ID NO: 315)
mCmCmCmAmCA*T*C*C*A*G*G*G*G*G*mGmUmCmUmU/iSp18//iSp18//3CholTEG/,
(SEQ ID NO: 403)
mUmUmAmGmAG*G*G*G*T*G*G*T*C*A*mCmAmGmGmA/iSp18//iSp18//3CholTEG/,
(SEQ ID NO: 434)
mCmAmGmGmUC*C*T*G*G*T*T*G*C*T*mCmCmCmAmG/iSp18//iSp18//3CholTEG/,
(SEQ ID NO: 465)
mCmCmGmAmCC*G*G*G*C*G*T*C*T*T*mCmCmCmCmG/iSp18//iSp18//3CholTEG/,
(SEQ ID NO: 516)
mGmGmGmUmGT*G*C*A*T*A*T*C*G*C*mAmGmUmCmG/iSp18//iSp18//3CholTEG/,
(SEQ ID NO: 596)
mGmAmGmCmAG*C*C*A*C*T*G*T*G*G*mAmUmGmCmA/iSp18//iSp18//3CholTEG/,
(SEQ ID NO: 614)
mCmCmUmGmCA*G*T*G*G*G*C*G*G*C*mCmGmUmGmA/iSp18//iSp18//3CholTEG/,
(SEQ ID NO: 829)
mCmCmAmGmCA*G*A*G*G*G*A*C*A*A*mUmGmAmGmA/iSp18//iSp18//3CholTEG/,
(SEQ ID NO: 830)
mCmCmCmAmGC*A*G*A*G*G*G*A*C*A*mAmUmGmAmG/iSp18//iSp18//3CholTEG/,
(SEQ ID NO: 831)
mUmCmCmCmAG*C*A*G*A*G*G*G*A*C*mAmAmUmGmA/iSp18//iSp18//3CholTEG/,
(SEQ ID NO: 852)
mAmGmCmCmAG*A*C*A*C*C*A*A*G*C*mAmCmUmUmU/iSp18//iSp18//3CholTEG/,
(SEQ ID NO: 856)
mCmCmCmCmAG*C*C*A*G*A*C*A*C*C*mAmAmGmCmA/iSp18//iSp18//3CholTEG/,
(SEQ ID NO: 875)
mUmUmGmGmGG*G*C*T*C*T*T*G*G*T*mUmGmUmCmC/iSp18//iSp18//3CholTEG/,
(SEQ ID NO: 876)
mCmUmUmGmGG*G*G*C*T*C*T*T*G*G*mUmUmGmUmC/iSp18//iSp18//3CholTEG/,
(SEQ ID NO: 878)
mCmAmCmUmUG*G*G*G*G*C*T*C*T*T*mGmGmUmUmG/iSp18//iSp18//3CholTEG/,
(SEQ ID NO: 879)
mGmCmAmCmUT*G*G*G*G*G*C*T*C*T*mUmGmGmUmU/iSp18//iSp18//3CholTEG/,
(SEQ ID NO: 891)
mCmCmUmUmAG*G*G*A*A*G*T*G*C*A*mCmUmUmGmG/iSp18//iSp18//3CholTEG/,
(SEQ ID NO: 901)
mCmAmCmUmGG*A*G*G*A*C*C*T*T*A*mGmGmGmAmA/iSp18//iSp18//3CholTEG/,
(SEQ ID NO: 905)
mCmAmAmGmCA*C*T*G*G*A*G*G*A*C*mCmUmUmAmG/iSp18//iSp18//3CholTEG/,
(SEQ ID NO: 908)
mAmUmUmCmAA*G*C*A*C*T*G*G*A*G*mGmAmCmCmU/iSp18//iSp18//3CholTEG/,
(SEQ ID NO: 909)
mUmAmUmUmCA*A*G*C*A*C*T*G*G*A*mGmGmAmCmC/iSp18//iSp18//3CholTEG/,
(SEQ ID NO: 912)
mUmGmAmUmAT*T*C*A*A*G*C*A*C*T*mGmGmAmGmG/iSp18//iSp18//3CholTEG/,
(SEQ ID NO: 913)
mCmUmGmAmUA*T*T*C*A*A*G*C*A*C*mUmGmGmAmG/iSp18//iSp18//3CholTEG/,
(SEQ ID NO: 954)
mGmUmCmUmCG*G*G*T*A*A*G*C*A*T*mCmCmUmCmG/iSp18//iSp18//3CholTEG/,
(SEQ ID NO: 980)
mGmGmCmGmCA*G*A*A*C*A*T*G*G*T*mGmUmCmAmU/iSp18//iSp18//3CholTEG/,
(SEQ ID NO: 1030)
mAmCmAmGmGC*C*C*C*C*C*A*G*A*A*mUmCmAmCmC/iSp18//iSp18//3CholTEG/,
(SEQ ID NO: 1079)
mAmGmGmGmUA*A*T*C*T*C*C*C*C*A*mGmGmAmCmA/iSp18//iSp18//3CholTEG/,
(SEQ ID NO: 1135)
mCmAmCmUmUG*G*T*G*A*A*C*T*T*G*mCmAmGmAmG/iSp18//iSp18//3CholTEG/,
(SEQ ID NO: 1147)
mGmUmUmUmCC*T*G*G*A*T*C*C*A*C*mUmUmGmGmU/iSp18//iSp18//3CholTEG/,
(SEQ ID NO: 1148)
mGmGmUmUmUC*C*T*G*G*A*T*C*C*A*mCmUmUmGmG/iSp18//iSp18//3CholTEG/,
(SEQ ID NO: 1154)
mCmUmGmGmAT*G*G*T*T*T*C*C*T*G*mGmAmUmCmC/iSp18//iSp18//3CholTEG/,
(SEQ ID NO: 1155)
mCmCmUmGmGA*T*G*G*T*T*T*C*C*T*mGmGmAmUmC/iSp18//iSp18//3CholTEG/,
(SEQ ID NO: 1156)
mGmCmCmUmGG*A*T*G*G*T*T*T*C*C*mUmGmGmAmU/iSp18//iSp18//3CholTEG/,
(SEQ ID NO: 1157)
mGmGmCmCmUG*G*A*T*G*G*T*T*T*C*mCmUmGmGmA/iSp18//iSp18//3CholTEG/,
(SEQ ID NO: 1161)
mAmGmUmUmGG*C*C*T*G*G*A*T*G*G*mUmUmUmCmC/iSp18//iSp18//3CholTEG/,
(SEQ ID NO: 1162)
mGmAmGmUmUG*G*C*C*T*G*G*A*T*G*mGmUmUmUmC/iSp18//iSp18//3CholTEG/,
(SEQ ID NO: 1163)
mGmGmAmGmUT*G*G*C*C*T*G*G*A*T*mGmGmUmUmU/iSp18//iSp18//3CholTEG/,
(SEQ ID NO: 1165)
mCmAmGmGmAG*T*T*G*G*C*C*T*G*G*mAmUmGmGmU/iSp18//iSp18//3CholTEG/,
(SEQ ID NO: 1166)
mUmCmAmGmGA*G*T*T*G*G*C*C*T*G*mGmAmUmGmG/iSp18//iSp18//3CholTEG/,
(SEQ ID NO: 1174)
mGmGmGmAmUG*A*C*T*C*A*G*G*A*G*mUmUmGmGmC/iSp18//iSp18//3CholTEG/,
(SEQ ID NO: 1189)
mGmGmUmGmUG*C*T*G*A*G*T*C*C*T*mGmGmGmAmU/iSp18//iSp18//3CholTEG/,
(SEQ ID NO: 1248)
mGmGmAmAmGG*A*A*T*G*A*G*G*G*T*mCmUmGmAmA/iSp18//iSp18//3CholTEG/,
(SEQ ID NO: 1259)
mCmAmAmCmAT*C*T*C*T*G*G*G*A*A*mGmGmAmAmU/iSp18//iSp18//3CholTEG/,
(SEQ ID NO: 1262)
mUmCmUmCmAA*C*A*T*C*T*C*T*G*G*mGmAmAmGmG/iSp18//iSp18//3CholTEG/,
(SEQ ID NO: 1265)
mCmAmUmUmCT*C*A*A*C*A*T*C*T*C*mUmGmGmGmA/iSp18//iSp18//3CholTEG/,
(SEQ ID NO: 1266)
mAmCmAmUmUC*T*C*A*A*C*A*T*C*T*mCmUmGmGmG/iSp18//iSp18//3CholTEG/,
(SEQ ID NO: 1267)
mAmAmCmAmUT*C*T*C*A*A*C*A*T*C*mUmCmUmGmG/iSp18//iSp18//3CholTEG/,
(SEQ ID NO: 1269)
mUmGmAmAmCA*T*T*C*T*C*A*A*C*A*mUmCmUmCmU/iSp18//iSp18//3CholTEG/,
(SEQ ID NO: 1275)
mGmAmGmAmGA*T*G*A*A*C*A*T*T*C*mUmCmAmAmC/iSp18//iSp18//3CholTEG/,
(SEQ ID NO: 1277)
mUmGmGmAmGA*G*A*T*G*A*A*C*A*T*mUmCmUmCmA/iSp18//iSp18//3CholTEG/,
(SEQ ID NO: 1278)
mCmUmGmGmAG*A*G*A*T*G*A*A*C*A*mUmUmCmUmC/iSp18//iSp18//3CholTEG/,
(SEQ ID NO: 1279)
mGmCmUmGmGA*G*A*G*A*T*G*A*A*C*mAmUmUmCmU/iSp18//iSp18//3CholTEG/,
(SEQ ID NO: 1292)
mCmAmUmGmGG*G*T*C*A*G*G*G*G*C*mUmGmGmAmG/iSp18//iSp18//3CholTEG/,
(SEQ ID NO: 1312)
mCmAmGmAmCC*C*T*G*A*G*T*C*C*A*mGmGmAmGmA/iSp18//iSp18//3CholTEG/,
(SEQ ID NO: 1334)
mGmGmUmCmAG*C*C*C*A*A*T*G*T*G*mGmGmGmGmA/iSp18//iSp18//3CholTEG/,
(SEQ ID NO: 1335)
mCmGmGmUmCA*G*C*C*C*A*A*T*G*T*mGmGmGmGmG/iSp18//iSp18//3CholTEG/,
(SEQ ID NO: 1337)
mCmAmCmGmGT*C*A*G*C*C*C*A*A*T*mGmUmGmGmG/iSp18//iSp18//3CholTEG/,
(SEQ ID NO: 1341)
mGmAmGmAmCA*C*G*G*T*C*A*G*C*C*mCmAmAmUmG/iSp18//iSp18//3CholTEG/,
(SEQ ID NO: 1342)
mAmGmAmGmAC*A*C*G*G*T*C*A*G*C*mCmCmAmAmU/iSp18//iSp18//3CholTEG/,
(SEQ ID NO: 1343)
mGmAmGmAmGA*C*A*C*G*G*T*C*A*G*mCmCmCmAmA/iSp18//iSp18//3CholTEG/,
(SEQ ID NO: 1344)
mAmGmAmGmAG*A*C*A*C*G*G*T*C*A*mGmCmCmCmA/iSp18//iSp18//3CholTEG/,
(SEQ ID NO: 1345)
mUmAmGmAmGA*G*A*C*A*C*G*G*T*C*mAmGmCmCmC/iSp18//iSp18//3CholTEG/,
(SEQ ID NO: 1346)
mCmUmAmGmAG*A*G*A*C*A*C*G*G*T*mCmAmGmCmC/iSp18//iSp18//3CholTEG/,
(SEQ ID NO: 1368)
mGmGmAmAmAT*T*G*T*T*C*C*C*A*G*mGmGmUmUmC/iSp18//iSp18//3CholTEG/,
(SEQ ID NO: 1397)
mGmAmGmAmCG*C*A*A*C*C*C*C*C*G*mCmCmCmUmG/iSp18//iSp18//3CholTEG/,
(SEQ ID NO: 1466)
mAmAmAmUmUT*G*G*G*T*C*A*G*A*G*mCmUmGmCmA/iSp18//iSp18//3CholTEG/,
(SEQ ID NO: 1474)
mCmUmGmGmGA*C*T*A*A*A*T*T*T*G*mGmGmUmCmA/iSp18//iSp18//3CholTEG/,
(SEQ ID NO: 1475)
mUmCmUmGmGG*A*C*T*A*A*A*T*T*T*mGmGmGmUmC/iSp18//iSp18//3CholTEG/,
(SEQ ID NO: 1624)
mCmAmCmGmGmUmGmUmUmAmGmAmGmGmGmGmUmGmGmU/iSp18//iSp18//3CholTEG/,

or a pharmaceutically acceptable salt thereof.

[0497] Embodiment 233. The synthetic oligonucleotide of embodiment 229, wherein the synthetic oligonucleotide comprises, consists essentially of, or consists of any one of SEQ ID NO: 112, SEQ ID NO: 315, SEQ ID NO: 830, SEQ ID NO: 891, SEQ ID NO: 1259, SEQ ID NO: 2010, SEQ ID NO: 2173, SEQ ID NO: 2625, SEQ ID NO: 2675, or SEQ ID NO: 3002, and/or wherein the synthetic oligonucleotide comprises, consists essentially of, or consists of any one of

(SEQ ID NO: 112)
mCmCmUmUmCC*C*T*G*C*C*T*G*C*T*mGmAmGmCmC/iSp18//
iSp18//3CholTEG/,
(SEQ ID NO: 315)
mCmCmCmAmCA*T*C*C*A*G*G*G*G*G*mGmUmCmUmU/iSp18//
iSp18//3CholTEG/,
(SEQ ID NO: 830)
mCmCmCmAmGC*A*G*A*G*G*G*A*C*A*mAmUmGmAmG/iSp18//
iSp18//3CholTEG/,
(SEQ ID NO: 891)
mCmCmUmUmAG*G*G*A*A*G*T*G*C*A*mCmUmUmGmG/iSp18//
iSp18//3CholTEG/,
or
(SEQ ID NO: 1259)
mCmAmAmCmAT*C*T*C*T*G*G*G*A*A*mGmGmAmAmU/iSp18//
iSp18//3CholTEG/,

or a pharmaceutically acceptable salt thereof.

[0498] Embodiment 234. The synthetic oligonucleotide of embodiment 231, wherein the nucleic acid comprises, consists essentially of, or consists of any one of SEQ ID NO; 3449, SEQ ID NO; 3670, SEQ ID NO: 3676, SEQ ID NO: 3704, SEQ ID NO: 3707, SEQ ID NO: 3749, SEQ ID NO: 3752, SEQ ID NO: 3998, SEQ ID NO: 4130, SEQ ID NO: 4868, SEQ ID NO: 5009, SEQ ID NO: 5024, SEQ ID NO: 5026, SEQ ID NO: 5376, SEQ ID NO: 5406, SEQ ID NO: 5411, SEQ ID NO: 5412, SEQ ID NO: 5425, SEQ ID NO: 5428, SEQ ID NO: 5431, SEQ ID NO: 5434, SEQ ID NO: 3996, SEQ ID NO: 3997, SEQ ID NO: 5437, SEQ ID NO: 5438, SEQ ID NO: 5443, SEQ ID NO: 5444, SEQ ID NO: 5445, SEQ ID NO: 5446, SEQ ID NO: 5447, SEQ ID NO: 5448, SEQ ID NO: 5454, SEQ ID NO: 5542, SEQ ID NO: 5588, SEQ ID NO: 5687, SEQ ID NO: 5879, SEQ ID NO: 5885, SEQ ID NO: 5901, SEQ ID NO: 5904, SEQ ID NO: 5940, SEQ ID NO: 5943, SEQ ID NO: 3998, SEQ ID NO: 6267, SEQ ID NO: 4868, SEQ ID NO: 7060, SEQ ID NO: 7070, SEQ ID NO: 7072, SEQ ID NO: 5376, SEQ ID NO: 7417, SEQ ID NO: 7422, SEQ ID NO: 7423, SEQ ID NO: 7431, SEQ ID NO: 7434, SEQ ID NO: 7437, SEQ ID NO: 7440, SEQ ID NO: 6153, SEQ ID NO: 6154, SEQ ID NO: 6155, SEQ ID NO; 4004, SEQ ID NOT 4005, SEQ ID NO: 4006, SEQ ID NO: 4007, SEQ ID NO: 6159, SEQ ID NO: 6160, SEQ ID NO: 6166, SEQ ID NO: 5910, SEQ ID NO; 5911, SEQ ID NO: 5912, SEQ ID NO; 5913, SEQ ID NO; 5918, SEQ ID NO; 5919, SEQ ID NO: 5920, SEQ ID NO: 5921, SEQ ID NO: 5922, SEQ ID NO: 5923, SEQ ID NO: 5929, SEQ ID NO: 6022, SEQ ID NO. 6068, SEQ ID NO; 6175, SEQ ID NO: 6396, SEQ ID NO: 6402, SEQ ID NO: 6430, SEQ ID NO: 6433, SEQ ID NO: 6475, SEQ ID NO; 6478, SEQ ID NO; 6724, SEQ ID NO: 6856, SEQ ID NO: 7594, SEQ ID NO: 7735, SEQ ID NO: 7750, SEQ ID NO: 7752, SEQ ID NO: 8102, SEQ ID NO: 8132, SEQ ID NO: 8137, SEQ ID NO: 8138, SEQ ID NO: 8151, SEQ ID NO 8154, SEQ ID NO: 8157, SEQ ID NO: 8160, SEQ ID NO: 6722, SEQ ID NO: 6723, SEQ ID NO: 6725, SEQ ID NO: 6730, SEQ ID NO: 6731, SEQ ID NO: 6732, SEQ ID NO: 6733, SEQ ID NO: 6734, SEQ ID NO: 6735, SEQ ID NO: 6741, or SEQ ID NO: 7516, and/or wherein the synthetic oligonucleotide comprises, consists essentially of, or consists of any one of

(SEQ ID NO: 3449)
mCmGmAmGA*G*G*A*T*C*T*G*A*T*mGmUmG/iSp18//iSp18//
3CholTEG/,
(SEQ ID NO: 3670)
mUmGmGmAG*C*T*G*A*T*T*G*C*C*mAmCmU/iSp18//iSp18//
3CholTEG/,
(SEQ ID NO: 3676)
mCmCmGmCA*G*T*G*G*A*G*C*T*G*mAmUmU/iSp18//iSp18//
3CholTEG/,
(SEQ ID NO: 3704)
mCmAmCmCC*A*G*C*G*C*T*C*A*T*mUmGmA/iSp18//iSp18//
3CholTEG/,
(SEQ ID NO: 3707)
mGmAmGmCA*C*C*C*A*G*C*G*C*T*mCmAmU/iSp18//iSp18//
3CholTEG/,
(SEQ ID NO: 3749)
mCmAmGmGT*G*C*A*C*G*G*T*G*T*mAmCmU/iSp18//iSp18//
3CholTEG/,
(SEQ ID NO: 3752)
mGmCmCmCA*G*G*T*G*C*A*C*G*G*mUmGmU/iSp18//iSp18//
3CholTEG/,
(SEQ ID NO: 3998)
mGmAmGmGT*C*A*G*A*G*G*G*A*A*mAmGmG/iSp18//iSp18//
3CholTEG/,
(SEQ ID NO: 4130)
mUmCmCmCC*C*T*G*A*G*T*C*A*C*mCmAmU/iSp18//iSp18//
3CholTEG/,
(SEQ ID NO: 4868)
mGmGmAmGG*C*T*G*A*A*G*C*A*C*mGmAmG/iSp18//iSp18//
3CholTEG/,
(SEQ ID NO: 5009)
mUmUmGmGG*A*G*G*C*C*A*A*G*G*mUmGmG/iSp18//iSp18//
3CholTEG/,
(SEQ ID NO: 5024)
mUmGmUmAA*T*C*C*C*A*G*C*A*C*mUmUmU/iSp18//iSp18//
3CholTEG/,
(SEQ ID NO: 5026)
mCmCmUmGT*A*A*T*C*C*C*A*G*C*mAmCmU/iSp18//iSp18//
3CholTEG/,
(SEQ ID NO: 5376)
mGmCmGmAmGmGmAmCmCmAmGmAmAmGmGmGmC/iSp18//iSp18//
3CholTEG/,
(SEQ ID NO: 5406)
mAmGmGmGmAmGmAmGmCmUmGmUmCmAmGmUmC/iSp18//iSp18//
3CholTEG/,
(SEQ ID NO: 5411)
mGmGmAmGmCmAmGmGmGmAmGmAmGmCmUmGmU/iSp18//iSp18//
3CholTEG/,
(SEQ ID NO: 5412)
mAmGmGmAmGmCmAmGmGmGmAmGmAmGmCmUmG/iSp18//iSp18//
3CholTEG/,
(SEQ ID NO: 5425)
mGmGmUmCmAmCmUmGmCmAmGmGmGmAmGmGmA/iSp18//iSp18//
3CholTEG/,
(SEQ ID NO: 5428)
mAmAmAmGmGmUmCmAmCmUmGmCmAmGmGmGmA/iSp18//iSp18//
3CholTEG/,
(SEQ ID NO: 5431)
mGmGmGmAmAmAmGmGmUmCmAmCmUmGmCmAmG/iSp18//iSp18//
3CholTEG/,
(SEQ ID NO: 5434)
mAmGmAmGmGmGmAmAmAmGmGmUmCmAmCmUmG/iSp18//iSp18//
3CholTEG/,
(SEQ ID NO: 3996)
mGmGmUmCmAmGmAmGmGmGmAmAmAmGmGmUmC/iSp18//iSp18//
3CholTEG/,
(SEQ ID NO: 3997)
mAmGmGmUmCmAmGmAmGmGmGmAmAmAmGmGmU/iSp18//iSp18//
3CholTEG/,
(SEQ ID NO: 5437)
mGmAmGmGmUmCmAmGmAmGmGmGmAmAmAmGmG/iSp18//iSp18//
3CholTEG/,
(SEQ ID NO: 5438)
mUmGmAmGmGmUmCmAmGmAmGmGmGmAmAmAmG/iSp18//iSp18//
3CholTEG/,
(SEQ ID NO: 5443)
mGmCmAmCmAmUmGmAmGmGmUmCmAmGmAmGmG/iSp18//iSp18//
3CholTEG/,
(SEQ ID NO: 5444)
mCmGmCmAmCmAmUmGmAmGmGmUmCmAmGmAmG/iSp18//iSp18//
3CholTEG/,
(SEQ ID NO: 5445)
mAmCmGmCmAmCmAmUmGmAmGmGmUmCmAmGmA/iSp18//iSp18//
3CholTEG/,
(SEQ ID NO: 5446)
mCmAmCmGmCmAmCmAmUmGmAmGmGmUmCmAmG/iSp18//iSp18//
3CholTEG/,
(SEQ ID NO: 5447)
mCmCmAmCmGmCmAmCmAmUmGmAmGmGmUmCmA/iSp18//iSp18//
3CholTEG/,
(SEQ ID NO: 5448)
mUmCmCmAmCmGmCmAmCmAmUmGmAmGmGmUmC/iSp18//iSp18//
3CholTEG/,
(SEQ ID NO: 5454)
mUmUmGmAmCmAmUmCmCmAmCmGmCmAmCmAmU/iSp18//iSp18//
3CholTEG/,
(SEQ ID NO: 5542)
mGmCmGmUmUmUmUmUmCmUmUmGmGmAmGmUmC/iSp18//iSp18//
3CholTEG/,
(SEQ ID NO: 5588)
mUmAmCmCmCmAmGmGmAmCmUmGmGmGmGmAmG/iSp18//iSp18//
3CholTEG/,

or a pharmaceutically acceptable salt thereof.

[0499] Embodiment 235. The synthetic oligonucleotide of embodiment 231, wherein the nucleic acid comprises, consists essentially of, or consists of any one of SEQ ID NO. 3998, SEQ ID NO. 3996, SEQ ID NO: 5437, SEQ ID NO: 5443, SEQ ID NO: 5588, SEQ ID NO: 3998, SEQ ID NO: 6153, SEQ ID NO: 4004, or SEQ ID NO: 7516, and/or wherein the synthetic oligonucleotide comprises, consists essentially of, or consists of any one of

(SEQ ID NO: 3998)
mGmAmGmGT*C*A*G*A*G*G*G*A*A*mAmGmG/iSp18//iSp18//
3CholTEG/,
(SEQ ID NO: 3996)
mGmGmUmCmAmGmAmGmGmGmAmAmAmGmGmUmC/iSp18//iSp18//
3CholTEG/,
(SEQ ID NO: 5437)
mGmAmGmGmUmCmAmGmAmGmGmGmAmAmAmGmG/iSp18//1Sp18//
3CholTEG/,
(SEQ ID NO: 5443)
mGmCmAmCmAmUmGmAmGmGmUmCmAmGmAmGmG/iSp18//iSp18//
3CholTEG/,
(SEQ ID NO: 5588)
mUmAmCmCmCmAmGmGmAmCmUmGmGmGmGmAmG/iSp18//iSp18//
3CholTEG/,

or a pharmaceutically acceptable salt thereof.

[0500] Embodiment 236. The synthetic oligonucleotide of any one of embodiments 229-235, wherein the nucleic acid sequence has a gap segment comprising five to 15 nucleosides, a 5′-wing segment comprising two to 10 linked nucleosides and a 3′-wing segment comprising two to 10 linked nucleosides, and wherein at least two consecutive nucleosides in at least one of the gap segment, the 5′-wing segment, the 3′-wing segment, or both the 5′-wing segment and the 3′-wing segment each comprise a 2′-O-methyl-modification.

[0501] Embodiment 237. The synthetic oligonucleotide of embodiment 236, wherein the 3′-wing segment comprises at least four consecutive nucleosides each comprising a 2′-O-methyl-modification.

[0502] Embodiment 238. The synthetic oligonucleotide of embodiment 236 or embodiment 237, wherein the 5′-wing segment comprises at least four consecutive nucleosides each comprising a 2′-O-methyl-modification.

[0503] Embodiment 239. The synthetic oligonucleotide of any one of embodiments 236-238, wherein the 3′-wing segment and the 5′-wing segment each comprise at least four consecutive nucleosides each comprising a 2′-O-methyl-modification.

[0504] Embodiment 240. The synthetic oligonucleotide any one of embodiments 229-239, wherein the nucleic acid sequence comprises a 2′-O-methyl-modification on at least one nucleoside.

[0505] Embodiment 241. The synthetic oligonucleotide of embodiment 240, wherein the 2′-O-methyl-modification is on at least 50% of the nucleosides.

[0506] Embodiment 242. The synthetic oligonucleotide of embodiment 240, wherein the 2′-O-methyl-modification is on every nucleoside.

[0507] Embodiment 243. The synthetic oligonucleotide of any one of embodiments 229-242, wherein the nucleic acid sequence comprises a phosphorothioate internucleoside linkage.

[0508] Embodiment 244. The synthetic oligonucleotide of embodiment 243, wherein at least 50% of internucleoside linkages are phosphorothioate internucleoside linkages.

[0509] Embodiment 245. The synthetic oligonucleotide of embodiment 243 or embodiment 244, wherein all internucleoside linkages are phosphorothioate internucleoside linkages.

[0510] Embodiment 246. The synthetic oligonucleotide of any one of embodiments 229-242, wherein the nucleic acid sequence does not comprise a phosphorothioate internucleoside linkage.

[0511] Embodiment 247. The synthetic oligonucleotide of any one of embodiments 229-239, wherein the nucleic acid sequence has a gap segment consisting of 10 linked nucleosides, a 5′-wing segment consisting of 4-5 linked nucleosides, and a 3′-wing segment consisting of 3-5 linked nucleosides, wherein the gap segment is positioned between the 5′-wing segment and the 3′-wing segment, and wherein two or more nucleosides in the 5′-wing segment, the 3′-wing segment, or both the 5′-wing segment and the 3′-wing segment comprise a modification.

[0512] Embodiment 248. The synthetic oligonucleotide of any one of embodiments 229-247, wherein the nucleic acid sequence further comprises a molecular species at one end of the nucleic acid sequence or at both ends of the nucleic acid sequence.

[0513] Embodiment 249. The synthetic oligonucleotide of embodiment 248, wherein the molecular species at both ends of the nucleic acid sequence are the same.

[0514] Embodiment 250. The synthetic oligonucleotide of embodiment 248, wherein the molecular species at both ends of the nucleic acid sequence are different.

[0515] Embodiment 251. The synthetic oligonucleotide of embodiment 248 or embodiment 250, wherein the molecular species is a cholesterol.

[0516] Embodiment 252. The synthetic oligonucleotide of embodiment 248 or embodiment 250, wherein the molecular species is a cholesteryl ester (N-cholesteryl-3-aminopropyl)-triethyleneglycol-glyceryl-1-O-phosphodiester (CholTEG).

[0517] Embodiment 253. The synthetic oligonucleotide of any one of embodiments 248-252, wherein the molecular species is directly attached to the nucleic acid sequence.

[0518] Embodiment 254. The synthetic oligonucleotide of any one of embodiment 248-253, wherein the molecular species is directly attached to the nucleic acid sequence through a covalent bond.

[0519] Embodiment 255. The synthetic oligonucleotide of any one of embodiments 248-254, wherein the molecular species is directly attached to the nucleic acid sequence through a phosphodiester, phosphorothioate, methylphosphonate or amide linkage.

[0520] Embodiment 256. The synthetic oligonucleotide of any one of embodiments 248-252, wherein the molecular species is indirectly attached to the nucleic acid sequence through a spacer.

[0521] Embodiment 257. The synthetic oligonucleotide of embodiment 256, wherein the spacer is or comprises a non-nucleotidic spacer.

[0522] Embodiment 258. The synthetic oligonucleotide of embodiment 256, wherein the spacer is or comprises a dSpacer, oligoethyleneglycol or alkane-diol.

[0523] Embodiment 259. The synthetic oligonucleotide of embodiment 256, wherein the spacer is or comprises a triethyleneglycol (spacer 9), hexaethylenegylcol (spacer 18) or butanediol.

[0524] Embodiment 260. The synthetic oligonucleotide of embodiment 256, wherein the spacer comprises a hexaethyleneglycol (spacer 18).

[0525] Embodiment 261. The synthetic oligonucleotide of embodiment 260, wherein the spacer comprises, consists essentially of, or consists of two hexaethyleneglycols.

[0526] Embodiment 262. A method of identifying synthetic oligonucleotides that decrease kallikrein-related peptidase (KLK) mRNA levels or KLK protein levels comprising.
[0527] (a) contacting a population of cells with a plurality of synthetic oligonucleotides complementary to or sufficiently complementary to one or more regions of a KLK gene and/or in one or more regions of a KLK gene product;
[0528] (b) culturing the population of cells to produce a population of cultured cells,
[0529] (c) measuring KLK mRNA levels or KLK protein levels in the population of cultured cells to obtain a value; and
[0530] (d) comparing the value in (c) with a reference level, wherein a value that is less than the reference level is indicative of a synthetic oligonucleotide that decreases KLK mRNA levels or KLK protein levels.

[0531] Embodiment 263. A method of identifying synthetic oligonucleotides that decrease kallikrein-related peptidase (KLK) mRNA levels or KLK protein levels comprising:
[0532] (a) contacting a population of cells with a plurality of spherical nucleic acids (SNAs), each SNA comprising a core and an oligonucleotide shell comprising a synthetic oligonucleotide complementary to or sufficiently complementary to one or more regions of a KLK gene and/or to one or more regions of a KLK gene product;
[0533] (b) culturing the population of cells to produce a population of cultured cells;
[0534] (c) measuring KLK mRNA levels or KLK protein levels in the population of cultured cells to obtain a value; and
[0535] (d) comparing the value in (c) with a reference level, wherein a value that is less than the reference level is indicative of a synthetic oligonucleotide that decreases KLK mRNA levels or KLK protein levels.

[0536] Embodiment 264. The method of embodiment 262 or embodiment 263, wherein the KLK mRNA is a KLK5 mRNA.

[0537] Embodiment 265. The method of embodiment 262 or embodiment 263, wherein the KLK protein is a KLK5 protein.

[0538] Embodiment 266. The method of embodiment 262 or embodiment 263, wherein the KLK mRNA is a KLK7 mRNA.

[0539] Embodiment 267. The method of embodiment 262 or embodiment 263, wherein the KLK protein is a KLK7 protein.

[0540] Embodiment 268. A library comprising a plurality of synthetic oligonucleotides, each synthetic oligonucleotide comprising a nucleic acid sequence complementary to or sufficiently complementary to a region of a kallikrein-related peptidase (KLK) gene and/or to a region of a KLK gene product, or a pharmaceutically acceptable salt thereof.

[0541] Embodiment 269. The library of embodiment 268, wherein the KLK gene is a KLK5 gene and/or the KLK gene product is a KLK5 gene product.

[0542] Embodiment 270. The library of embodiment 269, wherein the KLK gene is a KLK7 gene and/or the KLK gene product is a KLK7 gene product.

[0543] Embodiment 271. The library of any one of embodiment 268-270, wherein the region is within at least one of an exon, an intron, a 3′-untranslated region (3′-UTR), or a 5′-untranslated region (5′-UTR).

[0544] Embodiment 272. A library comprising a plurality of spherical nucleic acids (SNAs), each SNA comprising a synthetic oligonucleotide comprising a nucleic acid sequence complementary to or sufficiently complementary to a region of a kallikrein-related peptidase (KLK) gene and/or to a region of a KLK gene product.

[0545] Embodiment 273. The library of embodiment 272, wherein the KLK gene is a KLK5 gene.

[0546] Embodiment 274. The library of embodiment 272, wherein the KLK gene product is a KLK5 gene product.

[0547] Embodiment 275. The library of any one of embodiments 272-274, wherein the KLK gene is a KLK7 gene.

[0548] Embodiment 276. The library of any one of embodiment 272-274, wherein the KLK gene product is a KLK7 gene product.

[0549] Embodiment 277. The library of any one of embodiment 272-276, wherein the region is within at least one of an exon, an intron, a 3′-untranslated region (3′-UTR), or a 5′-untranslated region (5′-UTR).

[0550] Embodiment 278. A synthetic oligonucleotide comprising a nucleic acid sequence complementary to or sufficiently complementary to a region of a kallikrein-related peptidase 7 (KLK7) gene and/or to a region of a KLK7 gene product, wherein the nucleic acid sequence comprises, consists essentially of, or consists of SEQ ID NO: 4868, or a pharmaceutically acceptable salt thereof.

[0551] Embodiment 279. A synthetic oligonucleotide comprising a nucleic acid sequence complementary to or sufficiently complementary to a region of a kallikrein-related peptidase 7 (KLK7) gene and/or to a region of a KLK7 gene product, wherein the synthetic oligonucleotide comprises, consists essentially of, or consists of lG*lG*lA*G*G*/iMe-dC/*T*G*A*A*G*/iMe-dC/*A*/iMe-dC/*lG*lA*lG/iSp18//iSp18//3CholTEG/ (SEQ ID NO: 7842), or a pharmaceutically acceptable salt thereof.

[0552] Embodiment 280. A synthetic oligonucleotide comprising a nucleic acid sequence complementary to or sufficiently complementary to a region of a kallikrein-related peptidase 5 (KLK5) gene and/or to a region of a KLK5 gene product, wherein the nucleic acid sequence comprises, consists essentially of, or consists of SEQ ID NO: 1312, or a pharmaceutically acceptable salt thereof.

[0553] Embodiment 281. A synthetic oligonucleotide comprising a nucleic acid sequence complementary to or sufficiently complementary to a region of a kallikrein-related peptidase 5 (KLK5) gene and/or to a region of a KLK5 gene product, wherein the synthetic oligonucleotide comprises, consists essentially of, or consists of /5-Me-lC/*lA*lG*A*/iMe-dC/*/iMe-dC/*/iMe-dC/*T*G*A*G*T*/iMe-dC/*/iMe-dC/*A*G*G*lA*lG*lA/iSp18//iSp18//3CholTEG/ (SEQ ID NO: 7834), or a pharmaceutically acceptable salt thereof.

[0554] Embodiment 282. A spherical nucleic acid (SNA) comprising a core and an oligonucleotide shell, wherein the oligonucleotide shell comprises: a first synthetic oligonucleotide complementary to or sufficiently complementary to a region of a first kallikrein-related peptidase (KLK) gene and/or to a region of a first KLK gene product; and a second synthetic oligonucleotide complementary to or sufficiently complementary to a region of a second KLK gene and/or to a region of a second KLK gene product; wherein the first synthetic oligonucleotide comprises the sequence of SEQ ID NO: 1312, and wherein the second synthetic oligonucleotide comprises the sequence of SEQ ID NO: 4868.

[0555] Embodiment 283. A spherical nucleic acid (SNA) comprising a core and an oligonucleotide shell, wherein the oligonucleotide shell comprises: a first synthetic oligonucleotide complementary to or sufficiently complementary to a region of a first kallikrein-related peptidase (KLK) gene and/or to a region of a first KLK gene product; and a second synthetic oligonucleotide complementary to or sufficiently complementary to a region of a second KLK gene and/or to a region of a second KLK gene product; wherein the first synthetic oligonucleotide comprises/5-Me-lC/*lA*lG*A*/iMe-dC/*/iMe-dC/*/iMe-dC/*T*G*A*G*T*/iMe-dC/*/iMe-dC/*A*G*G*lA*lG*lA/iSp18//iSp18//3CholTEG/ (SEQ ID NO: 7834), and wherein the second synthetic oligonucleotide comprises lG*lG*lA*G*G*/iMe-dC/*T*G*A*A*G*/iMe-dC/*A*/iMe-dC/*lG*lA*lG/iSp18//iSp18//3CholTEG/ (SEQ ID NO: 7842).

[0556] Embodiment 284. A synthetic oligonucleotide comprising a nucleic acid sequence complementary to or sufficiently complementary to a region of a kallikrein-related peptidase 7 (KLK7) gene and/or to a region of a KLK7 gene product, wherein the nucleic acid sequence comprises, consists essentially of, or consists of SEQ ID NO: 3998, or a pharmaceutically acceptable salt thereof.

[0557] Embodiment 285. A synthetic oligonucleotide comprising a nucleic acid sequence complementary to or sufficiently complementary to a region of a kallikrein-related peptidase 7 (KLK7) gene and/or to a region of a KLK7 gene product, wherein the synthetic oligonucleotide comprises, consists essentially of, or consists of moeG*moeAmoeG*moeGmoeT*/5-Me-moeC/moeA*moeGmoeA*moeG/7deazaOMG/*moeGmoeA*moeAmoeA*moeG*moeG/iSp18//iSp18//3CholTEG/ (SEQ ID NO: 7616), or a pharmaceutically acceptable salt thereof.

[0558] Embodiment 286. A spherical nucleic acid (SNA) comprising a core and an oligonucleotide shell, wherein the oligonucleotide shell comprises: a first synthetic oligonucleotide complementary to or sufficiently complementary to a region of a first kallikrein-related peptidase (KLK) gene and/or to a region of a first KLK gene product; and a second synthetic oligonucleotide complementary to or sufficiently complementary to a region of a second KLK gene and/or to a region of a second KLK gene product; wherein the first synthetic oligonucleotide comprises the sequence of SEQ ID NO: 1312, and wherein the second synthetic oligonucleotide comprises the sequence of SEQ ID NO: 3998.

[0559] Embodiment 287. A spherical nucleic acid (SNA) comprising a core and an oligonucleotide shell, wherein the oligonucleotide shell comprises: a first synthetic oligonucleotide complementary to or sufficiently complementary to a region of a first kallikrein-related peptidase (KLK) gene and/or to a region of a first KLK gene product; and a second synthetic oligonucleotide complementary to or sufficiently complementary to a region of a second KLK gene and/or to a region of a second KLK gene product; wherein the first synthetic oligonucleotide comprises /5-Me-lC/*lA*lG*A*/iMe-dC/*/iMe-dC/*/iMe-dC/*T*G*A*G*T*/iMe-dC/*/iMe-dC/*A*G*G*lA*lG*lA/iSp18//iSp18//3CholTEG/ (SEQ ID NO: 7834), and wherein the second synthetic oligonucleotide comprises moeG*moeAmoeG*moeGmoeT*/5-Me-moeC/moeA*moeGmoeA*moeG/7deazaOMG/*moeGmoeA*moeAmoeA*moeG*moeG/iSp18//iSp18//3CholTEG/ (SEQ ID NO: 7616).

[0560] Embodiment 288. A synthetic oligonucleotide comprising a nucleic acid sequence complementary to or sufficiently complementary to a region of a kallikrein-related peptidase 5 (KLK5) gene and/or to a region of a KLK5 gene product, wherein the nucleic acid sequence comprises, consists essentially of, or consists of SEQ ID NO: 3118, or a pharmaceutically acceptable salt thereof.

[0561] Embodiment 289. A synthetic oligonucleotide comprising a nucleic acid sequence complementary to or sufficiently complementary to a region of a kallikrein-related peptidase 5 (KLK5) gene and/or to a region of a KLK5 gene product, wherein the synthetic oligonucleotide comprises, consists essentially of, or consists of lG*lA*lG*A*/iMe-dC/*G*/iMe-dC/*A*A*/iMe-dC/*/iMe-dC/*/iMe-dC/*/iMe-dC/*/iMe-dC/*G*/iMe-dC/*/iMe-dC/*/5-Me-lC/*lT*lG/iSp18//iSp18//3CholTEG/ (SEQ ID NO: 7836), or a pharmaceutically acceptable salt thereof.

[0562] Embodiment 290. A spherical nucleic acid (SNA) comprising a core and an oligonucleotide shell, wherein the oligonucleotide shell comprises: a first synthetic oligonucleotide complementary to or sufficiently complementary to a region of a first kallikrein-related peptidase (KLK) gene and/or to a region of a first KLK gene product; and a second synthetic oligonucleotide complementary to or sufficiently complementary to a region of a second KLK gene and/or to a region of a second KLK gene product; wherein the first synthetic oligonucleotide comprises the sequence of SEQ ID NO: 3118, and wherein the second synthetic oligonucleotide comprises the sequence of SEQ ID NO: 3998.

[0563] Embodiment 291. A spherical nucleic acid (SNA) comprising a core and an oligonucleotide shell, wherein the oligonucleotide shell comprises: a first synthetic oligonucleotide complementary to or sufficiently complementary to a region of a first kallikrein-related peptidase (KLK) gene and/or to a region of a first KLK gene product; and a second synthetic oligonucleotide complementary to or sufficiently complementary to a region of a second KLK gene and/or to a region of a second KLK gene product; wherein the first synthetic oligonucleotide comprises lG*lA*lG*A*/iMe-dC/*G*/iMe-dC/*A*A*/iMe-dC/*/iMe-dC/*/iMe-dC/*/iMe-dC/*/iMe-dC/*G*/iMe-dC/*/iMe-dC/*/5-Me-lC/*lT*lG/iSp18//iSp18//3CholTEG/ (SEQ ID NO: 7836), and wherein the second synthetic oligonucleotide comprises moeG*moeAmoeG*moeGmoeT*/5-Me-moeC/moeA*moeGmoeA*moeG/7deazaOMG/*moeGmoeA*moeAmoeA*moeG*moeG/iSp18//iSp18//3CholTEG/ (SEQ ID NO: 7616).

[0564] Embodiment 292. A synthetic oligonucleotide comprising a nucleic acid sequence complementary to or sufficiently complementary to a region of a kallikrein-related peptidase 7 (KLK7) gene and/or to a region of a KLK7 gene product, wherein the synthetic oligonucleotide comprises, consists essentially of, or consists of lG*lA*lG*G*T*/iMe-dC/*A*G*A*G*/7deazaG/*G*A*A*lA*lG*lG/isp18//iSp18//3CholTEG/ (SEQ ID NO: 7616), or a pharmaceutically acceptable salt thereof.

[0565] Embodiment 293. A spherical nucleic acid (SNA) comprising a core and an oligonucleotide shell, wherein the oligonucleotide shell comprises: a first synthetic oligonucleotide complementary to or sufficiently complementary to a region of a first kallikrein-related peptidase (KLK) gene and/or to a region of a first KLK gene product; and a second synthetic oligonucleotide complementary to or sufficiently complementary to a region of a second KLK gene and/or to a region of a second KLK gene product; wherein the first synthetic oligonucleotide comprises the sequence of SEQ ID NO: 3118, and wherein the second synthetic oligonucleotide comprises the sequence of SEQ ID NO: 3998.

[0566] Embodiment 294. A spherical nucleic acid (SNA) comprising a core and an oligonucleotide shell, wherein the oligonucleotide shell comprises: a first synthetic oligonucleotide complementary to or sufficiently complementary to a region of a first kallikrein-related peptidase (KLK) gene and/or to a region of a first KLK gene product; and a second synthetic oligonucleotide complementary to or sufficiently complementary to a region of a second KLK gene and/or to a region of a second KLK gene product; wherein the first synthetic oligonucleotide comprises lG*lA*lG*A*/iMe-dC/*G*/iMe-dC/*A*A*/iMe-dC/*/iMe-dC/*/iMe-dC/*/iMe-dC/*/iMe-dC/*G*/iMe-dC/*/iMe-dC/*/5-Me-lC/*lT*lG/iSp18//iSp18//3CholTEG/ (SEQ ID NO: 7836), and wherein the second synthetic oligonucleotide comprises lG*lA*lG*G*T*/iMe-dC/*A*G*A*G*/7deazaG/*G*A*A*lA*lG*lG/isp18//iSp18//3CholTEG/ (SEQ ID NO: 7616).

[0567] Embodiment 295. A synthetic oligonucleotide comprising a nucleic acid sequence complementary to or sufficiently complementary to a region of a kallikrein-related peptidase 7 (KLK7) gene and/or to a region of a KLK7 gene product, wherein the synthetic oligonucleotide comprises, consists essentially of, or consists of moeG*moeA*moeG*moeG*T*/iMe-dC/*A*G*A*G*/7deazaG/*G*A*A*moeA*moeG*moeG/iSp18//iSp18//3CholTEG/ (SEQ ID NO: 7616), or a pharmaceutically acceptable salt thereof.

[0568] Embodiment 296. A spherical nucleic acid (SNA) comprising a core and an oligonucleotide shell, wherein the oligonucleotide shell comprises: a first synthetic oligonucleotide complementary to or sufficiently complementary to a region of a first kallikrein-related peptidase (KLK) gene and/or to a region of a first KLK gene product; and a second synthetic oligonucleotide complementary to or sufficiently complementary to a region of a second KLK gene and/or to a region of a second KLK gene product; wherein the first synthetic oligonucleotide comprises the sequence of SEQ ID NO: 1312, and wherein the second synthetic oligonucleotide comprises the sequence of SEQ ID NO: 3998.

[0569] Embodiment 297. A spherical nucleic acid (SNA) comprising a core and an oligonucleotide shell, wherein the oligonucleotide shell comprises: a first synthetic oligonucleotide complementary to or sufficiently complementary to a region of a first kallikrein-related peptidase (KLK) gene and/or to a region of a first KLK gene product; and a second synthetic oligonucleotide complementary to or sufficiently complementary to a region of a second KLK gene and/or to a region of a second KLK gene product; wherein the first synthetic oligonucleotide comprises /5-Me-lC/*lA*lG*A*/iMe-dC/*/iMe-dC/*/iMe-dC/*T*G*A*G*T*/iMe-dC/*/iMe-dC/*A*G*G*lA*lG*lA/iSp18//iSp18//3CholTEG/ (SEQ ID NO: 7834), and wherein the second synthetic oligonucleotide comprises moeG*moeA*moeG*moeG*T*/iMe-dC/*A*G*A*G*/7deazaG/*G*A*A*moeA*moeG*moeG/iSp18//iSp18//3CholTEG/ (SEQ ID NO: 7616).

[0570] Embodiment 298. A synthetic oligonucleotide comprising a nucleic acid sequence complementary to or sufficiently complementary to a region of a kallikrein-related peptidase 7 (KLK7) gene and/or to a region of a KLK7 gene product, wherein the synthetic oligonucleotide comprises, consists essentially of, or consists of /CholTEG//iSp18//iSp18/moeG*moeA*moeG*moeG*T*/iMe-dC/*A*G*A*G*/7deazaG/*G*A*A*moeA*moeG*moeG (SEQ ID NO: 7616), or a pharmaceutically acceptable salt thereof.

[0571] Embodiment 299. A spherical nucleic acid (SNA) comprising a core and an oligonucleotide shell, wherein the oligonucleotide shell comprises: a first synthetic oligonucleotide complementary to or sufficiently complementary to a region of a first kallikrein-related peptidase (KLK) gene and/or to a region of a first KLK gene product; and a second synthetic oligonucleotide complementary to or sufficiently complementary to a region of a second KLK gene and/or to a region of a second KLK gene product; wherein the first synthetic oligonucleotide comprises the sequence of SEQ ID NO: 1312, and wherein the second synthetic oligonucleotide comprises the sequence of SEQ ID NO: 3998.

[0572] Embodiment 300. A spherical nucleic acid (SNA) comprising a core and an oligonucleotide shell, wherein the oligonucleotide shell comprises: a first synthetic oligonucleotide complementary to or sufficiently complementary to a region of a first kallikrein-related peptidase (KLK) gene and/or to a region of a first KLK gene product; and a second synthetic oligonucleotide complementary to or sufficiently complementary to a region of a second KLK gene and/or to a region of a second KLK gene product; wherein the first synthetic oligonucleotide comprises /5-Me-lC/*lA*lG*A*/iMe-dC/*/iMe-dC/*/iMe-dC/*T*G*A*G*T*/iMe-dC/*/iMe-dC/*A*G*G*lA*lG*lA/iSp18//iSp18//3CholTEG/ (SEQ ID NO: 7834), and wherein the second synthetic oligonucleotide comprises

(SEQ ID NO: 7616)
/CholTEG//iSp18//iSp18/moeG*moeA*moeG*moeG*T*/iMe-
dC/*A*G*A*G*/7deazaG/*G*A*A*moeA*moeG*moeG.

[0573] Embodiment 301. A synthetic oligonucleotide comprising a nucleic acid sequence complementary to or sufficiently complementary to a region of a kallikrein-related peptidase 7 (KLK7) gene and/or to a region of a KLK7 gene product, wherein the synthetic oligonucleotide comprises, consists essentially of, or consists of moeG*moeA*moeG*moeG*T*/iMe-dC/*A*G*A*G*/7deazaG/*G*A*A*moeA*moeG*moeG/iSp18//iSp18//3CholTEG/ (SEQ ID NO: 7616), or a pharmaceutically acceptable salt thereof.

[0574] Embodiment 302. A spherical nucleic acid (SNA) comprising a core and an oligonucleotide shell, wherein the oligonucleotide shell comprises: a first synthetic oligonucleotide complementary to or sufficiently complementary to a region of a first kallikrein-related peptidase (KLK) gene and/or to a region of a first KLK gene product; and a second synthetic oligonucleotide complementary to or sufficiently complementary to a region of a second KLK gene and/or to a region of a second KLK gene product; wherein the first synthetic oligonucleotide comprises the sequence of SEQ ID NO: 3118, and wherein the second synthetic oligonucleotide comprises the sequence of SEQ ID NO: 3998.

[0575] Embodiment 303. A spherical nucleic acid (SNA) comprising a core and an oligonucleotide shell, wherein the oligonucleotide shell comprises: a first synthetic oligonucleotide complementary to or sufficiently complementary to a region of a first kallikrein-related peptidase (KLK) gene and/or to a region of a first KLK gene product; and a second synthetic oligonucleotide complementary to or sufficiently complementary to a region of a second KLK gene and/or to a region of a second KLK gene product; wherein the first synthetic oligonucleotide comprises lG*lA*lG*A*/iMe-dC/*G*/iMe-dC/*A*A*/iMe-dC/*/iMe-dC/*/iMe-dC/*/iMe-dC/*/iMe-dC/*G*/iMe-dC/*/iMe-dC/*/5-Me-lC/*lT*lG/iSp18//iSp18//3CholTEG/ (SEQ ID NO: 7836), and wherein the second synthetic oligonucleotide comprises moeG*moeA*moeG*moeG*T*/iMe-dC/*A*G*A*G*/7deazaG/*G*A*A*moeA*moeG*moeG/iSp18//iSp18//3CholTEG/ (SEQ ID NO: 7616).

[0576] Embodiment 304. A synthetic oligonucleotide comprising a nucleic acid sequence complementary to or sufficiently complementary to a region of a kallikrein-related peptidase 7 (KLK7) gene and/or to a region of a KLK7 gene product, wherein the synthetic oligonucleotide comprises, consists essentially of, or consists of /CholTEG//iSp18//iSp18/moeG*moeA*moeG*moeG*T*/iMe-dC/*A*G*A*G*/7deazaG/*G*A*A*moeA*moeG*moeG (SEQ ID NO: 7616), or a pharmaceutically acceptable salt thereof.

[0577] Embodiment 305. A spherical nucleic acid (SNA) comprising a core and an oligonucleotide shell, wherein the oligonucleotide shell comprises: a first synthetic oligonucleotide complementary to or sufficiently complementary to a region of a first kallikrein-related peptidase (KLK) gene and/or to a region of a first KLK gene product; and a second synthetic oligonucleotide complementary to or sufficiently complementary to a region of a second KLK gene and/or to a region of a second KLK gene product; wherein the first synthetic oligonucleotide comprises the sequence of SEQ ID NO: 3118, and wherein the second synthetic oligonucleotide comprises the sequence of SEQ ID NO: 3998.

[0578] Embodiment 306. A spherical nucleic acid (SNA) comprising a core and an oligonucleotide shell, wherein the oligonucleotide shell comprises: a first synthetic oligonucleotide complementary to or sufficiently complementary to a region of a first kallikrein-related peptidase (KLK) gene and/or to a region of a first KLK gene product; and a second synthetic oligonucleotide complementary to or sufficiently complementary to a region of a second KLK gene and/or to a region of a second KLK gene product; wherein the first synthetic oligonucleotide comprises lG*lA*lG*A*/iMe-dC/*G*/iMe-dC/*A*A*/iMe-dC/*/iMe-dC/*/iMe-dC/*/iMe-dC/*/iMe-dC/*G*/iMe-dC/*/iMe-dC/*/5-Me-lC/*lT*lG/iSp18//iSp18//3CholTEG/ (SEQ ID NO: 7836), and wherein the second synthetic oligonucleotide comprises/CholTEG//iSp18//iSp18/moeG*moeA*moeG*moeG*T*/iMe-dC/*A*G*A*G*/7deazaG/*G*A*A*moeA*moeG*moeG (SEQ ID NO: 7616).

[0579] Embodiment 307. A synthetic oligonucleotide comprising a nucleic acid sequence complementary to or sufficiently complementary to a region of a kallikrein-related peptidase 7 (KLK7) gene and/or to a region of a KLK7 gene product, wherein the synthetic oligonucleotide comprises, consists essentially of, or consists of/CholTEG//iSp18//iSp18/G*lA*lG*G*T*/iMe-dC/*A*G*A*G*/7deazaG/*G*A*A*lA*lG*IG (SEQ ID NO: 7616), or a pharmaceutically acceptable salt thereof.

[0580] Embodiment 308. A spherical nucleic acid (SNA) comprising a core and an oligonucleotide shell, wherein the oligonucleotide shell comprises: a first synthetic oligonucleotide complementary to or sufficiently complementary to a region of a first kallikrein-related peptidase (KLK) gene and/or to a region of a first KLK gene product; and a second synthetic oligonucleotide complementary to or sufficiently complementary to a region of a second KLK gene and/or to a region of a second KLK gene product; wherein the first synthetic oligonucleotide comprises the sequence of SEQ ID NO: 1312, and wherein the second synthetic oligonucleotide comprises the sequence of SEQ ID NO: 3998.

[0581] Embodiment 309. A spherical nucleic acid (SNA) comprising a core and an oligonucleotide shell, wherein the oligonucleotide shell comprises: a first synthetic oligonucleotide complementary to or sufficiently complementary to a region of a first kallikrein-related peptidase (KLK) gene and/or to a region of a first KLK gene product; and a second synthetic oligonucleotide complementary to or sufficiently complementary to a region of a second KLK gene and/or to a region of a second KLK gene product; wherein the first synthetic oligonucleotide comprises/5-Me-lC/*lA*lG*A*/iMe-dC/*/iMe-dC/*/iMe-dC/*T*G*A*G*T*/iMe-dC/*/iMe-dC/*A*G*G*lA*lG*lA/iSp18//iSp18//3CholTEG/ (SEQ ID NO: 7834), and wherein the second synthetic oligonucleotide comprises

(SEQ ID NO: 7616)
/CholTEG//iSp18//iSp18/1G*1A*1G*G*T*/iMe-dC/*A*G*
A*G*/7deazaG/*G*A*A*1A*1G*1G.

[0582] Embodiment 310. A spherical nucleic acid (SNA) comprising a core and an oligonucleotide shell, wherein the oligonucleotide shell comprises: a first synthetic oligonucleotide complementary to or sufficiently complementary to a region of a first kallikrein-related peptidase (KLK) gene and/or to a region of a first KLK gene product; and a second synthetic oligonucleotide complementary to or sufficiently complementary to a region of a second KLK gene and/or to a region of a second KLK gene product; wherein the first synthetic oligonucleotide comprises the sequence of SEQ ID NO: 3118, and wherein the second synthetic oligonucleotide comprises the sequence of SEQ ID NO: 3998.

[0583] Embodiment 311. A spherical nucleic acid (SNA) comprising a core and an oligonucleotide shell, wherein the oligonucleotide shell comprises: a first synthetic oligonucleotide complementary to or sufficiently complementary to a region of a first kallikrein-related peptidase (KLK) gene and/or to a region of a first KLK gene product; and a second synthetic oligonucleotide complementary to or sufficiently complementary to a region of a second KLK gene and/or to a region of a second KLK gene product; wherein the first synthetic oligonucleotide comprises lG*lA*lG*A*/iMe-dC/*G*/iMe-dC/*A*A*/iMe-dC/*/iMe-dC/*/iMe-dC/*/iMe-dC/*% iMe-dC/*G*/iMe-dC/*/iMe-dC/*/5-Me-lC/*lT*lG/iSp18//iSp18//3CholTEG/ (SEQ ID NO: 7836), and wherein the second synthetic oligonucleotide comprises/CholTEG//iSp18//iSp18/G*lA*lG*G*T*/iMe-dC/*A*G*A*G*/7deazaG/*G*A*A*lA*lG*IG (SEQ ID NO: 7616).

[0584] Embodiment 312. A synthetic oligonucleotide comprising a nucleic acid sequence complementary to or sufficiently complementary to a region of a kallikrein-related peptidase 7 (KLK7) gene and/or to a region of a KLK7 gene product, wherein the nucleic acid sequence comprises, consists essentially of, or consists of SEQ ID NO: 5687, or a pharmaceutically acceptable salt thereof.

[0585] Embodiment 313. A synthetic oligonucleotide comprising a nucleic acid sequence complementary to or sufficiently complementary to a region of a kallikrein-related peptidase 7 (KLK7) gene and/or to a region of a KLK7 gene product, wherein the synthetic oligonucleotide comprises, consists essentially of, or consists of /5-Me-lC/*lG*lA*G*A*G*G*A*T*/iMe-dC/*T*G*A*T*lG*lT*lG/isp18//iSp18//3CholTEG/ (SEQ ID NO: 7583), or a pharmaceutically acceptable salt thereof.

[0586] Embodiment 314. A spherical nucleic acid (SNA) comprising a core and an oligonucleotide shell, wherein the oligonucleotide shell comprises: a first synthetic oligonucleotide complementary to or sufficiently complementary to a region of a first kallikrein-related peptidase (KLK) gene and/or to a region of a first KLK gene product; and a second synthetic oligonucleotide complementary to or sufficiently complementary to a region of a second KLK gene and/or to a region of a second KLK gene product; wherein the first synthetic oligonucleotide comprises the sequence of SEQ ID NO: 1312, and wherein the second synthetic oligonucleotide comprises the sequence of SEQ ID NO: 5687.

[0587] Embodiment 315. A spherical nucleic acid (SNA) comprising a core and an oligonucleotide shell, wherein the oligonucleotide shell comprises: a first synthetic oligonucleotide complementary to or sufficiently complementary to a region of a first kallikrein-related peptidase (KLK) gene and/or to a region of a first KLK gene product; and a second synthetic oligonucleotide complementary to or sufficiently complementary to a region of a second KLK gene and/or to a region of a second KLK gene product; wherein the first synthetic oligonucleotide comprises /5-Me-lC/*lA*lG*A*/iMe-dC/*/iMe-dC/*/iMe-dC/*T*G*A*G*T*/iMe-dC/*/iMe-dC/*A*G*G*lA*lG*lA/iSp18//iSp18//3CholTEG/ (SEQ ID NO: 7834), and wherein the second synthetic oligonucleotide comprises/5-Me-lC/*lG*lA*G*A*G*G*A*T*/iMe-dC/*T*G*A*T*lG*lT*lG/isp18//iSp18//3CholTEG/ (SEQ ID NO: 7583).

[0588] Embodiment 316. A synthetic oligonucleotide comprising a nucleic acid sequence complementary to or sufficiently complementary to a region of a kallikrein-related peptidase 7 (KLK7) gene and/or to a region of a KLK7 gene product, wherein the nucleic acid sequence comprises, consists essentially of, or consists of SEQ ID NO: 5879, or a pharmaceutically acceptable salt thereof.

[0589] Embodiment 317. A synthetic oligonucleotide comprising a nucleic acid sequence complementary to or sufficiently complementary to a region of a kallikrein-related peptidase 7 (KLK7) gene and/or to a region of a KLK7 gene product, wherein the synthetic oligonucleotide comprises, consists essentially of, or consists of lT*lG*lG*A*G*/iMe-dC/*T*G*A*T*T*G*/iMe-dC/*/iMe-dC/*lA*/5-Me-lC/*lT/isp18//iSp18//3CholTEG/ (SEQ ID NO: 7592), or a pharmaceutically acceptable salt thereof.

[0590] Embodiment 318. A spherical nucleic acid (SNA) comprising a core and an oligonucleotide shell, wherein the oligonucleotide shell comprises: a first synthetic oligonucleotide complementary to or sufficiently complementary to a region of a first kallikrein-related peptidase (KLK) gene and/or to a region of a first KLK gene product; and a second synthetic oligonucleotide complementary to or sufficiently complementary to a region of a second KLK gene and/or to a region of a second KLK gene product; wherein the first synthetic oligonucleotide comprises the sequence of SEQ ID NO: 1312, and wherein the second synthetic oligonucleotide comprises the sequence of SEQ ID NO: 5879.

[0591] Embodiment 319. A spherical nucleic acid (SNA) comprising a core and an oligonucleotide shell, wherein the oligonucleotide shell comprises: a first synthetic oligonucleotide complementary to or sufficiently complementary to a region of a first kallikrein-related peptidase (KLK) gene and/or to a region of a first KLK gene product; and a second synthetic oligonucleotide complementary to or sufficiently complementary to a region of a second KLK gene and/or to a region of a second KLK gene product; wherein the first synthetic oligonucleotide comprises/5-Me-lC/*lA*lG*A*/iMe-dC/*/iMe-dC/*/iMe-dC/*T*G*A*G*T*/iMe-dC/*/iMe-dC/*A*G*G*lA*lG*lA/iSp18//iSp18//3CholTEG/ (SEQ ID NO: 7834), and wherein the second synthetic oligonucleotide comprises lT*lG*lG*A*G*/iMe-dC/*T*G*A*T*T*G*/iMe-dC/*/iMe-dC/*lA*/5-Me-lC/*lT/isp18//iSp18//3CholTEG/ (SEQ ID NO: 7592).

[0592] Embodiment 320. A synthetic oligonucleotide comprising a nucleic acid sequence complementary to or sufficiently complementary to a region of a kallikrein-related peptidase 7 (KLK7) gene and/or to a region of a KLK7 gene product, wherein the nucleic acid sequence comprises, consists essentially of, or consists of SEQ ID NO: 5904, or a pharmaceutically acceptable salt thereof.

[0593] Embodiment 321. A synthetic oligonucleotide comprising a nucleic acid sequence complementary to or sufficiently complementary to a region of a kallikrein-related peptidase 7 (KLK7) gene and/or to a region of a KLK7 gene product, wherein the synthetic oligonucleotide comprises, consists essentially of, or consists of lG*lA*lG*/iMe-dC/*A*/iMe-dC/*/iMe-dC/*/iMe-dC/*A*G*/iMe-dC,/*G*/iMe-dC/*T*/5-Me-lC/*lA*T/isp18//iSp18//3CholTEG/ (SEQ ID NO: 7600), or a pharmaceutically acceptable salt thereof.

[0594] Embodiment 322. A spherical nucleic acid (SNA) comprising a core and an oligonucleotide shell, wherein the oligonucleotide shell comprises: a first synthetic oligonucleotide complementary to or sufficiently complementary to a region of a first kallikrein-related peptidase (KLK) gene and/or to a region of a first KLK gene product; and a second synthetic oligonucleotide complementary to or sufficiently complementary to a region of a second KLK gene and/or to a region of a second KLK gene product; wherein the first synthetic oligonucleotide comprises the sequence of SEQ ID NO: 1312, and wherein the second synthetic oligonucleotide comprises the sequence of SEQ ID NO: 5904.

[0595] Embodiment 323. A spherical nucleic acid (SNA) comprising a core and an oligonucleotide shell, wherein the oligonucleotide shell comprises: a first synthetic oligonucleotide complementary to or sufficiently complementary to a region of a first kallikrein-related peptidase (KLK) gene and/or to a region of a first KLK gene product; and a second synthetic oligonucleotide complementary to or sufficiently complementary to a region of a second KLK gene and/or to a region of a second KLK gene product; wherein the first synthetic oligonucleotide comprises/5-Me-lC/*lA*lG*A*/iMe-dC/*/iMe-dC/*/iMe-dC/*T*G*A*G*T*/iMe-dC/*/iMe-dC/*A*G*G*lA*lG*lA/iSp18//iSp18//3CholTEG/ (SEQ ID NO: 7834), and wherein the second synthetic oligonucleotide comprises lG*lA*lG*/iMe-dC/*A*/iMe-dC/*/iMe-dC/*/iMe-dC/*A*G*/iMe-dC/*G*/iMe-dC/*T*/5-Me-lC/*lA*lT/isp18//iSp18//3CholTEG/ (SEQ ID NO: 7600).

[0596] Embodiment 324. A synthetic oligonucleotide comprising a nucleic acid sequence complementary to or sufficiently complementary to a region of a kallikrein-related peptidase 7 (KLK7) gene and/or to a region of a KLK7 gene product, wherein the nucleic acid sequence comprises, consists essentially of, or consists of SEQ ID NO: 5943, or a pharmaceutically acceptable salt thereof.

[0597] Embodiment 325. A synthetic oligonucleotide comprising a nucleic acid sequence complementary to or sufficiently complementary to a region of a kallikrein-related peptidase 7 (KLK7) gene and/or to a region of a KLK7 gene product, wherein the synthetic oligonucleotide comprises, consists essentially of, or consists of lG*/5-Me-lC/*/5-Me-lC/*/iMe-dC/*A*G*G*T*G*/iMe-dC/*A*/iMe-dC/*G*G*lT*lG*IT/isp18//iSp18//3CholTEG/ (SEQ ID NO: 7607), or a pharmaceutically acceptable salt thereof.

[0598] Embodiment 326. A spherical nucleic acid (SNA) comprising a core and an oligonucleotide shell, wherein the oligonucleotide shell comprises: a first synthetic oligonucleotide complementary to or sufficiently complementary to a region of a first kallikrein-related peptidase (KLK) gene and/or to a region of a first KLK gene product; and a second synthetic oligonucleotide complementary to or sufficiently complementary to a region of a second KLK gene and/or to a region of a second KLK gene product; wherein the first synthetic oligonucleotide comprises the sequence of SEQ ID NO: 1312, and wherein the second synthetic oligonucleotide comprises the sequence of SEQ ID NO: 5943.

[0599] Embodiment 327. A spherical nucleic acid (SNA) comprising a core and an oligonucleotide shell, wherein the oligonucleotide shell comprises: a first synthetic oligonucleotide complementary to or sufficiently complementary to a region of a first kallikrein-related peptidase (KLK) gene and/or to a region of a first KLK gene product; and a second synthetic oligonucleotide complementary to or sufficiently complementary to a region of a second KLK gene and/or to a region of a second KLK gene product; wherein the first synthetic oligonucleotide comprises/5-Me-lC/*lA*lG*A*/iMe-dC/*/iMe-dC/*/iMe-dC/*T*G*A*G*T*/iMe-dC/*/iMe-dC/*A*G*G*lA*lG*lA/iSp18//iSp18//3CholTEG/ (SEQ ID NO: 7834), and wherein the second synthetic oligonucleotide comprises lG*/5-Me-lC/*/5-Me-lC/*/iMe-dC/*A*G*G*T*G*/iMe-dC/*A*/iMe-dC/*G*G*lT*lG*IT/isp18//iSp18//3CholTEG/ (SEQ ID NO: 7607).

[0600] Embodiment 328. A synthetic oligonucleotide comprising a nucleic acid sequence complementary to or sufficiently complementary to a region of a kallikrein-related peptidase 7 (KLK7) gene and/or to a region of a KLK7 gene product, wherein the nucleic acid sequence comprises, consists essentially of, or consists of SEQ ID NO: 6267, or a pharmaceutically acceptable salt thereof.

[0601] Embodiment 329. A synthetic oligonucleotide comprising a nucleic acid sequence complementary to or sufficiently complementary to a region of a kallikrein-related peptidase 7 (KLK7) gene and/or to a region of a KLK7 gene product, wherein the synthetic oligonucleotide comprises, consists essentially of, or consists of lT*/5-Me-lC/*/5-Me-lC/*/iMe-dC/*/iMe-dC/*/iMe-dC/*T*G*A*G*T*/iMe-dC/*A*/iMe-dC/*/5-Me-lC/*lA*lT/isp18//iSp18//3CholTEG/ (SEQ ID NO: 7623), or a pharmaceutically acceptable salt thereof.

[0602] Embodiment 330. A spherical nucleic acid (SNA) comprising a core and an oligonucleotide shell, wherein the oligonucleotide shell comprises: a first synthetic oligonucleotide complementary to or sufficiently complementary to a region of a first kallikrein-related peptidase (KLK) gene and/or to a region of a first KLK gene product; and a second synthetic oligonucleotide complementary to or sufficiently complementary to a region of a second KLK gene and/or to a region of a second KLK gene product; wherein the first synthetic oligonucleotide comprises the sequence of SEQ ID NO: 1312, and wherein the second synthetic oligonucleotide comprises the sequence of SEQ ID NO: 6267.

[0603] Embodiment 331. A spherical nucleic acid (SNA) comprising a core and an oligonucleotide shell, wherein the oligonucleotide shell comprises: a first synthetic oligonucleotide complementary to or sufficiently complementary to a region of a first kallikrein-related peptidase (KLK) gene and/or to a region of a first KLK gene product; and a second synthetic oligonucleotide complementary to or sufficiently complementary to a region of a second KLK gene and/or to a region of a second KLK gene product; wherein the first synthetic oligonucleotide comprises /5-Me-lC/*lA*lG*A*/iMe-dC/*/iMe-dC/*/iMe-dC/*T*G*A*G*T*/iMe-dC/*/iMe-dC/*A*G*G*lA*lG*lA/iSp18//iSp18//3CholTEG/ (SEQ ID NO: 7834), and wherein the second synthetic oligonucleotide comprises lT*/5-Me-lC/*/5-Me-lC/*/iMe-dC/*/iMe-dC/*/iMe-dC/*T*G*A*G*T*/iMe-dC/*A*/iMe-dC/*/5-Me-lC/*lA*IT/isp18//iSp18//3CholTEG/ (SEQ ID NO: 7623).

[0604] Embodiment 332. A spherical nucleic acid (SNA) comprising a core and an oligonucleotide shell, wherein the oligonucleotide shell comprises: a first synthetic oligonucleotide complementary to or sufficiently complementary to a region of a first kallikrein-related peptidase (KLK) gene and/or to a region of a first KLK gene product; and a second synthetic oligonucleotide complementary to or sufficiently complementary to a region of a second KLK gene and/or to a region of a second KLK gene product; wherein the first synthetic oligonucleotide comprises the sequence of SEQ ID NO: 3118, and wherein the second synthetic oligonucleotide comprises the sequence of SEQ ID NO: 5687.

[0605] Embodiment 333. A spherical nucleic acid (SNA) comprising a core and an oligonucleotide shell, wherein the oligonucleotide shell comprises: a first synthetic oligonucleotide complementary to or sufficiently complementary to a region of a first kallikrein-related peptidase (KLK) gene and/or to a region of a first KLK gene product; and a second synthetic oligonucleotide complementary to or sufficiently complementary to a region of a second KLK gene and/or to a region of a second KLK gene product; wherein the first synthetic oligonucleotide comprises lG*lA*lG*A*/iMe-dC/*G*/iMe-dC/*A*A*/iMe-dC/*/iMe-dC/*/iMe-dC/*/iMe-dC/*/iMe-dC/*G*/iMe-dC/*/iMe-dC/*/5-Me-lC/*lT*lG/iSp18//iSp18//3CholTEG/ (SEQ ID NO: 7836), and wherein the second synthetic oligonucleotide comprises/5-Me-lC/*lG*lA*G*A*G*G*A*T*/iMe-dC/*T*G*A*T*lG*lT*lG/isp18//iSp18//3CholTEG/ (SEQ ID NO: 7583).

[0606] Embodiment 334. A spherical nucleic acid (SNA) comprising a core and an oligonucleotide shell, wherein the oligonucleotide shell comprises: a first synthetic oligonucleotide complementary to or sufficiently complementary to a region of a first kallikrein-related peptidase (KLK) gene and/or to a region of a first KLK gene product; and a second synthetic oligonucleotide complementary to or sufficiently complementary to a region of a second KLK gene and/or to a region of a second KLK gene product; wherein the first synthetic oligonucleotide comprises the sequence of SEQ ID NO: 3118, and wherein the second synthetic oligonucleotide comprises the sequence of SEQ ID NO: 5879.

[0607] Embodiment 335. A spherical nucleic acid (SNA) comprising a core and an oligonucleotide shell, wherein the oligonucleotide shell comprises: a first synthetic oligonucleotide complementary to or sufficiently complementary to a region of a first kallikrein-related peptidase (KLK) gene and/or to a region of a first KLK gene product; and a second synthetic oligonucleotide complementary to or sufficiently complementary to a region of a second KLK gene and/or to a region of a second KLK gene product; wherein the first synthetic oligonucleotide comprises lG*lA*lG*A*/iMe-dC/*G*/iMe-dC/*A*A*/iMe-dC/*/iMe-dC/*/iMe-dC/*/iMe-dC/*/iMe-dC/*G*/iMe-dC/*/iMe-dC/*/5-Me-lC/*lT*lG/iSp18//iSp18//3CholTEG/ (SEQ ID NO: 7836), and wherein the second synthetic oligonucleotide comprises lT*lG*lG*A*G*/iMe-dC/*T*G*A*T*T*G*/iMe-dC/*/iMe-dC/*lA*/5-Me-lC/*lT/isp18//iSp18//3CholTEG/ (SEQ ID NO: 7592).

[0608] Embodiment 336. A spherical nucleic acid (SNA) comprising a core and an oligonucleotide shell, wherein the oligonucleotide shell comprises: a first synthetic oligonucleotide complementary to or sufficiently complementary to a region of a first kallikrein-related peptidase (KLK) gene and/or to a region of a first KLK gene product; and a second synthetic oligonucleotide complementary to or sufficiently complementary to a region of a second KLK gene and/or to a region of a second KLK gene product; wherein the first synthetic oligonucleotide comprises the sequence of SEQ ID NO: 3118, and wherein the second synthetic oligonucleotide comprises the sequence of SEQ ID NO: 5904.

[0609] Embodiment 337. A spherical nucleic acid (SNA) comprising a core and an oligonucleotide shell, wherein the oligonucleotide shell comprises: a first synthetic oligonucleotide complementary to or sufficiently complementary to a region of a first kallikrein-related peptidase (KLK) gene and/or to a region of a first KLK gene product; and a second synthetic oligonucleotide complementary to or sufficiently complementary to a region of a second KLK gene and/or to a region of a second KLK gene product; wherein the first synthetic oligonucleotide comprises lG*lA*lG*A*/iMe-dC/*G*/iMe-dC/*A*A*/iMe-dC/*/iMe-dC/*/iMe-dC/*/iMe-dC/*/iMe-dC/*G*/iMe-dC/*/iMe-dC/*/5-Me-lC/*lT*lG/iSp18//iSp18//3CholTEG/ (SEQ ID NO: 7836), and wherein the second synthetic oligonucleotide comprises lG*lA*lG*/iMe-dC/*A*/iMe-dC/*/iMe-dC/*/iMe-dC/*A*G*/iMe-dC/*G*/iMe-dC/*T*/5-Me-lC/*lA*lT/isp18//iSp18//3CholTEG/ (SEQ ID NO: 7600).

[0610] Embodiment 338. A spherical nucleic acid (SNA) comprising a core and an oligonucleotide shell, wherein the oligonucleotide shell comprises: a first synthetic oligonucleotide complementary to or sufficiently complementary to a region of a first kallikrein-related peptidase (KLK) gene and/or to a region of a first KLK gene product; and a second synthetic oligonucleotide complementary to or sufficiently complementary to a region of a second KLK gene and/or to a region of a second KLK gene product; wherein the first synthetic oligonucleotide comprises the sequence of SEQ ID NO: 3118, and wherein the second synthetic oligonucleotide comprises the sequence of SEQ ID NO: 5943.

[0611] Embodiment 339. A spherical nucleic acid (SNA) comprising a core and an oligonucleotide shell, wherein the oligonucleotide shell comprises: a first synthetic oligonucleotide complementary to or sufficiently complementary to a region of a first kallikrein-related peptidase (KLK) gene and/or to a region of a first KLK gene product; and a second synthetic oligonucleotide complementary to or sufficiently complementary to a region of a second KLK gene and/or to a region of a second KLK gene product; wherein the first synthetic oligonucleotide comprises lG*lA*lG*A*/iMe-dC/*G*/iMe-dC/*A*A*/iMe-dC/*/iMe-dC/*/iMedC/*/iMe-dC/*/iMe-dC/*G*/iMe-dC*/iMe-dC/*/5-Me-lC/*lT*lG/iSp18//iSp18//3CholTEG/ (SEQ ID NO: 7836), and wherein the second synthetic oligonucleotide comprises lG*/5-Me-lC/*/5-Me-lC/*/iMe-dC/*A*G*G*T*G*/iMe-dC/*A*/iMe-dC/*G*G*lT*lG*IT/isp18//iSp18//3CholTEG/ (SEQ ID NO: 7607).

[0612] Embodiment 340. A spherical nucleic acid (SNA) comprising a core and an oligonucleotide shell, wherein the oligonucleotide shell comprises: a first synthetic oligonucleotide complementary to or sufficiently complementary to a region of a first kallikrein-related peptidase (KLK) gene and/or to a region of a first KLK gene product; and a second synthetic oligonucleotide complementary to or sufficiently complementary to a region of a second KLK gene and/or to a region of a second KLK gene product; wherein the first synthetic oligonucleotide comprises the sequence of SEQ ID NO: 3118, and wherein the second synthetic oligonucleotide comprises the sequence of SEQ ID NO: 3998.

[0613] Embodiment 341. A spherical nucleic acid (SNA) comprising a core and an oligonucleotide shell, wherein the oligonucleotide shell comprises: a first synthetic oligonucleotide complementary to or sufficiently complementary to a region of a first kallikrein-related peptidase (KLK) gene and/or to a region of a first KLK gene product; and a second synthetic oligonucleotide complementary to or sufficiently complementary to a region of a second KLK gene and/or to a region of a second KLK gene product; wherein the first synthetic oligonucleotide comprises lG*lA*lG*A*/iMe-dC/*G*/iMe-dC/*A*A*/iMe-dC/*/iMe-dC/*/iMe-dC/*/iMe-dC/*% iMe-dC/*G*/iMe-dC/*/iMe-dC/*/5-Me-lC/*lT*lG/iSp18//iSp18//3CholTEG/ (SEQ ID NO: 7836), and wherein the second synthetic oligonucleotide comprises lG*lA*lG*G*T*/iMe-dC/*A*G*A*G*/7deazaG/*G*A*A*lA*lG*lG/isp18//iSp18//3CholTEG/ (SEQ ID NO: 7616).

[0614] Embodiment 342. A spherical nucleic acid (SNA) comprising a core and an oligonucleotide shell, wherein the oligonucleotide shell comprises: a first synthetic oligonucleotide complementary to or sufficiently complementary to a region of a first kallikrein-related peptidase (KLK) gene and/or to a region of a first KLK gene product; and a second synthetic oligonucleotide complementary to or sufficiently complementary to a region of a second KLK gene and/or to a region of a second KLK gene product; wherein the first synthetic oligonucleotide comprises the sequence of SEQ ID NO: 3118, and wherein the second synthetic oligonucleotide comprises the sequence of SEQ ID NO: 6267.

[0615] Embodiment 343. A spherical nucleic acid (SNA) comprising a core and an oligonucleotide shell, wherein the oligonucleotide shell comprises: a first synthetic oligonucleotide complementary to or sufficiently complementary to a region of a first kallikrein-related peptidase (KLK) gene and/or to a region of a first KLK gene product; and a second synthetic oligonucleotide complementary to or sufficiently complementary to a region of a second KLK gene and/or to a region of a second KLK gene product; wherein the first synthetic oligonucleotide comprises lG*lA*lG*A*/iMe-dC/*G*/iMe-dC/*A*A*/iMe-dC/*/iMe-dC/*/iMe-dC/*/iMe-dC/*/iMe-dC/*G*/iMe-dC/*/iMe-dC/*/5-Me-lC/*lT*lG/iSp18//iSp18//3CholTEG/ (SEQ ID NO: 7836), and wherein the second synthetic oligonucleotide comprises lT*/5-Me-lC/*/5-Me-lC/*/iMe-dC/*/iMe-dC/*/iMe-dC/*T*G*A*G*T*/iMe-dC/*A*/iMe-dC/*/5-Me-lC/*lA*lT/isp18//iSp18//3CholTEG/ (SEQ ID NO: 7623).

[0616] Embodiment 344. A spherical nucleic acid (SNA) comprising a core and an oligonucleotide shell that comprises a synthetic oligonucleotide, wherein the synthetic oligonucleotide comprises a nucleic acid sequence complementary to or sufficiently complementary to a region of a kallikrein-related peptidase (KLK) gene and/or to a region of a KLK gene product, or a pharmaceutically acceptable salt thereof.

### Sequences

[0617] Except where indicated otherwise, abbreviations used herein are defined according to Table 24.

TABLE 24
Abbreviations

| Abbreviation | Meaning |
|---|---|
| mA | 2′-O-Methyl Adenosine |
| mC | 2′-O-Methyl Cytidine |
| mG | 2′-O-Methyl Guanosine |
| mU | 2′-O-Methyl Uridine |
| A | Deoxyadenosine |
| C | Deoxycytidine |
| G | Deoxyguanosine |
| T | Deoxythymidine |
| moeA | 2′-O-Methoxyethoxy Adenosine |
| 5-Me-MOE-C | 2′-O-Methoxyethoxy-5-Methyl Cytidine |
| moeG | 2′-O-Methoxyethoxy Guanosine |
| moeT | 2′-O-Methoxyethoxy-5-Methyl Uridine |
| lA | LNA Adenosine |
| 5-Me-lC | LNA 5-Methyl Cytidine |
| lG | LNA Guanosine |
| lT | LNA Thymidine |
| iMe-dc | 5-Methyl deoxy Cytidine |
| 7deazaG | 7-Deaza deoxy Guanosine |
| 7deazaOMG | 7-deaza-2′-O-Methyl Guanosine |
| 3CholTEG | Cholesterol-triethyleneglycol (3′End) |
| CholTEG | Cholesterol-triethyleneglycol (5′End) |
| Toco | Tocopherol |
| 3ThioMC6-D | Thiol modifier C6 S-S |
| branch | Symmetrical Branching |
| Stearyl | Stearyl |
| iSp18 | Hexaethylene Glycol |
| * | Phosphorothioate internucleoside linkage |
| % Inhib | Percent gene inhibition |
| % Inhib. 1 | Percent gene inhibition, first measurement |
| % Inhib. 2 | Percent gene inhibition, second measurement |
| ASO | Antisense oligonucleotide |
| NR | None reported |

TABLE 25
Chemical names for LNAs used in sequences

| Abbreviation | Chemical Name |
|---|---|
| lA | (2′-O, 4′-C methylene)-Adenosine |
| 5-Me-lC | 5-methyl-(2′-O, 4′-C methylene)-Cytidine |
| lG | (2′-0, 4′-C methylene)-Guanosine |
| lT | 5-methyl-(2′-O, 4′-C methylene)-Uridine |

Abbreviations used in Tables 1, 2, 3 and 4: mA=2′-O-Methyl Adenosine; mC=2′-O-Methyl Cytidine; mG=2′-O-Methyl Guanosine; mU=2′-O-Methyl Uridine; 3CholTEG=3′ (N-cholesteryl-3-aminopropyl)-triethyleneglycol-glyceryl-1-O-phosphodiester; iSp18=Hexaethylene Glycol. A=deoxyadenosine; C=deoxycytidine, G=deoxyguanosine; T=deoxythymidine; *=phosphorothioate internucleoside linkage; NR=none reported; % Inhib. 1=percent gene inhibition, first measurement, % Inhib. 2=percent gene inhibition, second measurement; SNA=spherical nucleic acid; ASO=antisense oligonucleotide
“Seq. Start Site” within Tables 1-14 indicates the first nucleotide position of SEQ ID NO: 7575 or KLK oligonuclotides) or SEQ ID NO: 776 (for KLK7 oligonucleotides) to which the oligonucleotide is complementary, except as indicated with a †, in which case the nucleotide position is within SEQ ID NO: 7477 (for KLK5 oligonucleotides) or SEQ ID NO: 7478 (for KLK7 oligonucleotides).

Lengthy table referenced here
US20230340488A1-20231026-T00001
Please refer to the end of the specification for access instructions.

Lengthy table referenced here
US20230340488A1-20231026-T00002
Please refer to the end of the specification for access instructions.

Lengthy table referenced here
US20230340488A1-20231026-T00003
Please refer to the end of the specification for access instructions.

Lengthy table referenced here
US20230340488A1-20231026-T00004
Please refer to the end of the specification for access instructions.

Lengthy table referenced here
US20230340488A1-20231026-T00005
Please refer to the end of the specification for access instructions.

Lengthy table referenced here
US20230340488A1-20231026-T00006
Please refer to the end of the specification for access instructions.

Lengthy table referenced here
US20230340488A1-20231026-T00007
Please refer to the end of the specification for access instructions.

Lengthy table referenced here
US20230340488A1-20231026-T00008
Please refer to the end of the specification for access instructions.

Lengthy table referenced here
US20230340488A1-20231026-T00009
Please refer to the end of the specification for access instructions.

Lengthy table referenced here
US20230340488A1-20231026-T00010
Please refer to the end of the specification for access instructions.

Lengthy table referenced here
US20230340488A1-20231026-T00011
Please refer to the end of the specification for access instructions.

Lengthy table referenced here
US20230340488A1-20231026-T00012
Please refer to the end of the specification for access instructions.

Lengthy table referenced here
US20230340488A1-20231026-T00013
Please refer to the end of the specification for access instructions.

Lengthy table referenced here
US20230340488A1-20231026-T00014
Please refer to the end of the specification for access instructions.

Lengthy table referenced here
US20230340488A1-20231026-T00015
Please refer to the end of the specification for access instructions.

Lengthy table referenced here
US20230340488A1-20231026-T00016
Please refer to the end of the specification for access instructions.

Lengthy table referenced here
US20230340488A1-20231026-T00017
Please refer to the end of the specification for access instructions.

Lengthy table referenced here
US20230340488A1-20231026-T00018
Please refer to the end of the specification for access instructions.

Lengthy table referenced here
US20230340488A1-20231026-T00019
Please refer to the end of the specification for access instructions.

Lengthy table referenced here
US20230340488A1-20231026-T00020
Please refer to the end of the specification for access instructions.

Lengthy table referenced here
US20230340488A1-20231026-T00021
Please refer to the end of the specification for access instructions.

Lengthy table referenced here
US20230340488A1-20231026-T00022
Please refer to the end of the specification for access instructions.

Lengthy table referenced here
US20230340488A1-20231026-T00023
Please refer to the end of the specification for access instructions.

### EQUIVALENTS

[0618] Those skilled in the art will recognize, or be able to ascertain using no more than routine experimentation, many equivalents to the specific embodiments of the invention described herein. Such equivalents are intended to be encompassed by the following claims.

[0619] All references, including patent documents, disclosed herein are incorporated by reference in their entirety.

LENGTHY TABLES
The patent application contains a lengthy table section. A copy of the table is available in electronic form from the USPTO web site (https://seqdata.uspto.gov/?pageRequest=docDetail&DocID=US20230340488A1). An electronic copy of the table will also be available from the USPTO upon request and payment of the fee set forth in 37 CFR 1.19(b)(3).

What is claimed is:

1. A synthetic oligonucleotide comprising a nucleic acid sequence complementary to or sufficiently complementary to a region of a kallikrein-related peptidase (KLK) gene and/or to a region of a KLK gene product, and at least one locked nucleic acid (LNA) modification or LNA modified nucleoside, or a pharmaceutically acceptable salt thereof.

2. The synthetic oligonucleotide of claim 1, wherein the KLK gene is a KLK5 gene.

3. The synthetic oligonucleotide of claim 1 or 2, wherein the KLK gene product is a KLK5 gene product.

4. The synthetic oligonucleotide of any one of claims 1-3, wherein the KLK gene is a KLK7 gene.

5. The synthetic oligonucleotide of any one of claims 1-4, wherein the KLK gene product is a KLK7 gene product.

6. A synthetic oligonucleotide comprising a nucleic acid sequence complementary to or sufficiently complementary to a region of a kallikrein-related peptidase (KLK) 7 gene and/or to a region of a KLK7 gene product, and at least one modification chosen from a base modification, a sugar modification or an internucleoside linkage modification, or a pharmaceutically acceptable salt thereof.

7. The synthetic oligonucleotide of any one of claims 1-6, wherein the synthetic oligonucleotide or the nucleic acid sequence is indirectly attached to a molecular species.

8. The synthetic oligonucleotide of claim 7, wherein the molecular species is indirectly attached to the 3′-end of the synthetic oligonucleotide or the nucleic acid sequence.

9. The synthetic oligonucleotide of claim 7, wherein the molecular species is indirectly attached to the 5′-end of the synthetic oligonucleotide or the nucleic acid sequence.

10. The synthetic oligonucleotide of claim 7 or 8, wherein the molecular species comprises, consists essentially of, or consists of a cholesterol or a tocopherol.

11. The synthetic oligonucleotide of any one of claims 9-10, wherein the molecular species comprises, consists essentially of, or consists of a cholesterol.

12. The synthetic oligonucleotide of any one of claims 7-11, wherein the molecular species comprises, consists essentially of, or consists of (N-cholesteryl-3-aminopropyl)-triethyleneglycol-glyceryl-1-O-phosphodiester (CholTEG).

13. The synthetic oligonucleotide of any one of claims 1-12, wherein the synthetic oligonucleotide further comprises a spacer.

14. The synthetic oligonucleotide of claim 13, wherein the spacer comprises, consists essentially of, or consists of an oligoethylene.

15. The synthetic oligonucleotide of claim 14, wherein the oligoethylene is hexaethyleneglycol (HEG).

16. The synthetic oligonucleotide of any one of claims 13-15, wherein the spacer comprises, consists essentially of, or consists of HEG and triethyleneglycol (TEG).

17. The synthetic oligonucleotide of any one of claims 13-16, wherein the spacer comprises, consists essentially of, or consists of hexa(ethyleneglycol)phosphodiester-hexa(ethyleneglycol)phosphodiester (HEG-HEG).

18. The synthetic oligonucleotide of any one of claims 13-17, wherein the molecular species is indirectly attached to the synthetic oligonucleotide or the nucleic acid sequence through the spacer.

19. The synthetic oligonucleotide of any one of claims 1-18, wherein the synthetic oligonucleotide comprises at least one phosphorothioate internucleoside linkage.

20. The synthetic oligonucleotide of any one of claims 1-18, wherein the synthetic oligonucleotide comprises two or more phosphorothioate internucleoside linkages, or wherein each internucleoside linkage of the synthetic oligonucleotide is a phosphorothioate internucleoside linkage.

21. The synthetic oligonucleotide of any one of claims 1-20, wherein the synthetic oligonucleotide comprises at least two modifications or modified nucleoside(s).

22. The synthetic oligonucleotide of claim 21, wherein the at least two modifications or modified nucleosides are at least one of a modification or modified nucleoside chosen from a 2′-O-methyl modification (2′-O-Me) or 2′-O-Me modified nucleoside, a 2′-O-methoxyethyl (2′-MOE) modification or 2′-MOE modified nucleoside, a 2′-O-methoxyethoxy-5-methyl (5-Me-MOE) modification or 5-Me-MOE modified nucleoside, an LNA modification or LNA modified nucleoside, a 5-methyl (5-Me) modification or 5-Me modified nucleoside, a 5-methyl LNA modified nucleoside, a 7-deaza modification or 7-deaza modified nucleoside, and a 7-deaza-2′-O-methyl (7deazaOM) modification or 7deazaOM modified nucleoside.

23. The synthetic oligonucleotide of any one of claims 1-22, wherein the synthetic oligonucleotide further comprises at least one modification or modified nucleoside chosen from a 5-Me modification or a 5-Me modified nucleoside, a 7-deaza modification or 7-deaza modified nucleoside and a phosphorothioate internucleoside linkage.

24. The synthetic oligonucleotide of any one of claims 1-23, wherein synthetic oligonucleotide comprises an LNA modification or an LNA modified nucleoside, a 5-Me modification or 5-Me modified nucleoside, and a phosphorothioate internucleoside linkage.

25. The synthetic oligonucleotide of any one of claims 1-23, wherein the synthetic oligonucleotide comprises five 5-Me modified nucleosides and six LNA modified nucleosides.

26. The synthetic oligonucleotide of any one of claims 1-23, wherein the synthetic oligonucleotide comprises an LNA modification or an LNA modified nucleoside, a 5-Me modification or 5-Me modified nucleoside, a 7-deaza modification or 7-deaza modified nucleoside, and a phosphorothioate internucleoside linkage.

27. The synthetic oligonucleotide of any one of claims 1-23, wherein the synthetic oligonucleotide comprises one 5-Me modification or 5-Me modified nucleoside, one 7-deaza modification or 7-deaza modified nucleoside and six LNA modifications or LNA modified nucleosides.

28. The synthetic oligonucleotide of any one of claim 1-27, wherein the LNA modified nucleoside comprises, consists essentially of, or consists of (2′-O, 4′-C methylene)-Adenosine, 5-methyl-(2′-O, 4′-C methylene)-Cytidine, (2′-O, 4′-C methylene)-Guanosine, or 5-methyl-(2′-O, 4′-C methylene)-Uridine.

29. The synthetic oligonucleotide of any one of claims 1-28, wherein the region is within an exon.

30. The synthetic oligonucleotide of any one of claims 1-29, wherein the region is within exon 6 of a KLK5 gene or a KLK5 gene product.

31. The synthetic oligonucleotide of any one of claims 1-30, wherein the region is within exon 5 of a KLK7 gene or a KLK7 gene product.

32. The synthetic oligonucleotide of any one of claims 1-29, wherein the region is within exon 1, exon 3, exon 4 or exon 6 of a KLK7 gene or a KLK7 gene product.

33. The synthetic oligonucleotide of any one of claims 1-29, wherein the region is within both exons 5 and 6 of a KLK7 gene or a KLK7 gene product.

34. The synthetic oligonucleotide of any one of claims 1-33, wherein the region is within a 5′-untranslated region (UTR) or a 3′-UTR.

35. The synthetic oligonucleotide of any one of claims 1-33, wherein the region is within a coding sequence.

36. The synthetic oligonucleotide of any one of claims 1-35, wherein the nucleic acid sequence is 10 to 30 nucleobases or nucleosides in length.

37. The synthetic oligonucleotide of any one of claims 1-35, wherein the nucleic acid sequence is 15 to 22 nucleobases or nucleosides in length.

38. The synthetic oligonucleotide of any one of claims 1-35, wherein the nucleic acid sequence is 17 nucleobases or nucleosides in length.

39. The synthetic oligonucleotide of any one of claims 1-35, wherein the nucleic acid sequence is 20 nucleobases or nucleosides in length.

40. The synthetic oligonucleotide of any one of claims 1-39, wherein the nucleic acid sequence comprises, consists essentially of, or consists of GAGGTCAGAGGGAAAGG (SEQ ID NO. 3998).

41. The synthetic oligonucleotide of any one of claims 1-39, wherein the synthetic oligonucleotide comprises, consists essentially of, or consists of /CholTEG//iSp18//iSp18/lG*lA*lG*G*T*/iMe-dC/*A*G*A*G*/7deazaG/*G*A*A*lA*lG*lG (SEQ ID NO: 7616), wherein lA, lG, A, T, G, iMe-dC, 7deazaG, *, iSp18 and CholTEG are defined as in Table 24.

42. The synthetic oligonucleotide of any one of claims 1-39, wherein the nucleic acid sequence comprises, consists essentially of, or consists of CAGACCCTGAGTCCAGGAGA (SEQ ID NO: 1312).

43. The synthetic oligonucleotide of any one of claims 1-39, wherein the synthetic oligonucleotide comprises, consists essentially of, or consists of /5-Me-lC/*lA*lG*A*/iMe-dC/*/iMe-dC/*/iMe-dC/*T*G*A*G*T*/iMe-dC/*/iMe-dC/*A*G*G*lA*lG*lA/iSp18//iSp18//3CholTEG/ (SEQ ID NO: 7834), wherein 5-Me-lC, lA, lG, A, T, G, iMe-dC, *, iSp18 and 3CholTEG are defined as in Table 24.

44. The synthetic oligonucleotide of any one of claims 1-39, wherein the nucleic acid sequence comprises, consists essentially of, or consists of GAGACGCAACCCCCGCCCTG (SEQ ID NO: 3118).

45. The synthetic oligonucleotide of any one of claims 1-39, wherein the synthetic oligonucleotide comprises, consists essentially of, or consists of lG*lA*lG*A*/iMe-dC/*G*/iMe-dC/*A*A*/iMe-dC/*/iMe-dC/*/iMe-dC/*/iMe-dC/*/iMe-dC/*G*/iMe-dC/*/iMe-dC/*/5-Me-lC/*lT*lG/iSp18//iSp18//3CholTEG/ (SEQ ID NO: 7836), wherein 5-Me-lC, lA, lG, lT, A, G, iMe-dC, *, iSp18, and 3CholTEG are defined as in Table 24.

46. A pharmaceutical composition comprising the synthetic oligonucleotide, or the pharmaceutically acceptable salt thereof, of any one of claims 1-45.

47. A spherical nucleic acid (SNA) comprising a core and an oligonucleotide shell, wherein the oligonucleotide shell comprises:
a first synthetic oligonucleotide comprising a first nucleic acid sequence complementary to or sufficiently complementary to a region of a first kallikrein-related peptidase (KLK) gene that is a KLK5 gene and/or to a region of a first KLK gene product that is a KLK5 gene product; and
a second synthetic oligonucleotide comprising a second nucleic acid sequence complementary to or sufficiently complementary to a region of a second KLK gene that is a KLK7 gene and/or to a region of a second KLK gene product that is a KLK7 gene product.

48. The SNA of claim 47, wherein the region of the first KLK gene and/or the region of the first KLK gene product is within exon 6 of a KLK5 gene or a KLK5 gene product.

49. The SNA of claim 47, wherein the region of the second KLK gene and/or the region of the second KLK gene product is within exon 5 of a KLK7 gene or a KLK7 gene product.

50. The SNA of claim 47, wherein the region of the first KLK gene and/or the region of the first KLK gene product is within exon 6 of a KLK5 gene or a KLK5 gene product and the region of the second KLK gene and/or the region of the second KLK gene product is within exon of a KLK7 gene or a KLK7 gene product.

51. The SNA of any one of claims 47-50, wherein the first synthetic oligonucleotide is a synthetic oligonucleotide of any one of claims 1-45 and the second synthetic oligonucleotide is a synthetic oligonucleotide of any one of claims 1-45.

52. The SNA of any one of claims 47-51, wherein the first synthetic oligonucleotide or nucleic acid sequence is indirectly attached to a first molecular species and the second synthetic oligonucleotide or nucleic acid sequence is indirectly attached to a second molecular species.

53. The SNA of claim 52, wherein the first molecular species is indirectly attached to one end of the first synthetic oligonucleotide or nucleic acid sequence and the second molecular species is indirectly attached to one end of the second synthetic oligonucleotide or nucleic acid sequence.

54. The SNA of claim 52 or 53, wherein the first molecular species is indirectly attached to the 3′-end of the first synthetic oligonucleotide or nucleic acid sequence and the second molecular species is indirectly attached to the 5′-end of the second synthetic oligonucleotide or nucleic acid sequence.

55. The SNA of any one of claims 52-54, wherein the first synthetic oligonucleotide is anchored to the surface of the core through the first molecular species and the second synthetic oligonucleotide is anchored to the surface of the core through the second molecular species.

56. The SNA of any one of claims 52-55, wherein the oligonucleotide shell comprises a plurality of the first synthetic oligonucleotides to form a first population of synthetic oligonucleotides and a plurality of the second synthetic oligonucleotides to form a second population of synthetic oligonucleotides, wherein each of the first synthetic oligonucleotides is anchored to the surface of the core through the first molecular species and each of the second synthetic oligonucleotides is anchored to the surface of the core through the second molecular species.

57. The SNA of any one of claims 47-56, wherein the first nucleic acid sequence comprises, consists essentially of, or consists of CAGACCCTGAGTCCAGGAGA (SEQ ID NO: 1312), and wherein the second nucleic acid sequence comprises, consists essentially of, or consists of GAGGTCAGAGGGAAAGG (SEQ ID NO: 3998).

58. The SNA of any one of claims 47-57, wherein the first synthetic oligonucleotide comprises, consists essentially of, or consists of /5-Me-lC/*lA*lG*A*/iMe-dC/*/iMe-dC/*/iMe-dC/*T*G*A*G*T*/iMe-dC/*/iMe-dC/*A*G*G*lA*lG*lA/iSp18//iSp18//3CholTEG/ (SEQ ID NO: 7834), and wherein the second synthetic oligonucleotide comprises, consists essentially of, or consists of/CholTEG//iSp18//iSp18/lG*lA*lG*G*T*/iMe-dC/*A*G*A*G*/7deazaG/*G*A*A*lA*lG*IG (SEQ ID NO: 7616), wherein 5-Me-lC, lA, lG, A, T, G, iMe-dC, 7deazaG, *, iSp18, CholTEG and 3CholTEG are defined as in Table 24.

59. The SNA of any one of claims 47-58, wherein the first synthetic oligonucleotide comprises, consists essentially of, or consists of the synthetic oligonucleotide of claim A43 and wherein the second synthetic oligonucleotide comprises, consists essentially of, or consists of the synthetic oligonucleotide of claim A41.

60. The SNA of any one of claims 47-56, wherein the first nucleic acid sequence comprises, consists essentially of, or consists of GAGACGCAACCCCCGCCCTG (SEQ ID NO: 3118), and wherein the second nucleic acid sequence comprises, consists essentially of, or consists of GAGGTCAGAGGGAAAGG (SEQ ID NO: 3998).

61. The SNA of any one of claims 47-56 and 60, wherein the first synthetic oligonucleotide comprises, consists essentially of, or consists of lG*lA*lG*A*/iMe-dC/*G*/iMe-dC/*A*A*/iMe-dC/*/iMe-dC/*/iMe-dC/*/iMe-dC/*/iMe-dC/*G*/iMe-dC/*/iMe-dC,*/5-Me-lC/*lT*lG/iSp18//iSp18;/3CholTEG/ (SEQ ID NO: 7836), and wherein the second synthetic oligonucleotide comprises, consists essentially of, or consists of /CholTEG//iSp18//iSp18/G*lA*lG*G*T*/iMe-dC/*A*G*A*G*/7deazaG/*G*A*A*lA*lG*lG (SEQ ID NO: 7616), wherein lG, lA, lT, 5-Me-lC, A, G, T, iMe-dC, 7deazaG, *, iSp18, CholTEG and 3CholTEG are defined as in Table 24.

62. The SNA of any one of claims 47-56, wherein the first synthetic oligonucleotide comprises, consists essentially of, or consists of the synthetic oligonucleotide of claim 45 and wherein the second synthetic oligonucleotide comprises, consists essentially of, or consists of the synthetic oligonucleotide of claim 41.

63. The SNA of any one of claims 47-62, wherein the core is a hollow core or solid core.

64. The SNA of claim 63, wherein the hollow core is a liposome core.

65. The SNA of any one of claims 47-64, wherein the oligonucleotide shell comprises, consists essentially of, or consists of 20 to 50 total first synthetic oligonucleotides and second synthetic oligonucleotides.

66. The SNA of any one of claims 47-65, wherein the oligonucleotide shell comprises, consists essentially of, or consists of 25 to 35 total first synthetic oligonucleotides and second synthetic oligonucleotides.

67. The SNA of any one of claims 47-66, wherein the oligonucleotide shell comprises, consists essentially of, or consists of or about 30 total first synthetic oligonucleotides and second synthetic oligonucleotides.

68. The SNA of claim 67, wherein the oligonucleotide shell comprises, consists essentially of, or consists of or about 15 first synthetic oligonucleotides and of or about 15 second synthetic oligonucleotides.

69. The SNA of any one of claims 56-68, wherein the core is a liposome core comprising lipid molecules, and wherein the first population of synthetic oligonucleotides and the second population of synthetic oligonucleotides are at a molar ratio of or about 50 to 1 of lipid molecules to the first population of synthetic oligonucleotides and the second population of synthetic oligonucleotides.

70. The SNA of any one of claims 56-68, wherein the core is a liposome core comprising or consisting of lipid molecules, and wherein the first population of synthetic oligonucleotides and the second population of synthetic oligonucleotides are at a molar ratio of or about 50 to 0.5 to 0.5 of lipid molecules to the first population of synthetic oligonucleotides to the second population of synthetic oligonucleotides.

71. A pharmaceutical composition comprising the SNA of any one of claims 47-70.

72. A method of decreasing kallikrein-related peptidase (KLK) mRNA levels in a cell, the method comprising:
contacting a cell comprising a KLK gene and/or a KLK gene product, with a synthetic oligonucleotide of any one of claims A1-A45, an SNA of any one of claims 47-70, or a pharmaceutical composition of claim 46 or 71, to decrease KLK mRNA levels in the cell relative to a reference level.

73. The method of claim 72, wherein the KLK mRNA levels are KLK5 mRNA levels, KLK7 mRNA levels, or both KLK5 mRNA levels and KLK7 mRNA levels.

74. The method of claim 72 or 73, wherein the cell comprises a KLK5 gene, a KLK7 gene, or a KLK5 gene and a KLK7 gene.

75. The method of claim 73, wherein the decreased KLK5 mRNA levels, KLK7 mRNA levels, or KLK5 mRNA levels and KLK7 mRNA levels result in decreased KLK5 protein levels, KLK7 protein levels, or both KLK5 protein levels and KLK7 protein levels in the cell relative to a reference level.

76. The method of any one of claims 72-75, wherein the cell is a skin cell.

77. The method of any one of claims 72-75, wherein the cell is at least one of an epithelial cell, a dermal cell, a keratinocyte, an immune cell, a basal cell, an inner root sheath cell, an external root sheath cell, a sebaceous gland cell, and a sweat gland cell.

78. The method of any one of claims 72-75, wherein the cell is a keratinocyte.

79. A method of treating a disease or disorder in a subject comprising:
administering to a subject in order to treat the disease or disorder in the subject an effective amount of a synthetic oligonucleotide of any one of claims 1-45, an SNA of any one of claims 47-70, or a pharmaceutical composition of claim 46 or 71.

80. The method of claim 79, wherein the disease or disorder is an ichthyosis disease or disorder.

81. The method of claim 79 or 80, wherein the subject has mutations in two serine peptidase inhibitor, Kazal type 5 (SPINK5) alleles.

82. The method of any one of claims 79-81, wherein the disease or disorder is a chronic skin disease or disorder.

83. The method of any one of claims 79-81, wherein the disease or disorder is Netherton syndrome (NS) or atopic dermatitis.

84. The method of any one of claims 79-81, wherein the disease or disorder is NS.

85. The method of any one of claims 79-84, wherein the decrease in KLK5 mRNA levels, KLK7 mRNA levels, or in both KLK5 mRNA levels and KLK7 mRNA levels and/or the decrease in KLK5 protein levels, KLK7 protein levels, or both KLK5 protein levels and KLK7 protein levels in the subject is relative to a reference level.

86. The method of claim 85, wherein the KLK5 and/or KLK7 mRNA and/or protein levels are decreased in one or more cells in the subject, and wherein the one or more cells in the subject are at least one of a skin cell, an epithelial cell, a dermal cell, a keratinocyte, an immune cell, a basal cell, an inner root sheath cell, an external root sheath cell, a sebaceous gland cell, and a sweat gland cell.

87. The method of claim 85, wherein the KLK5 and/or KLK7 mRNA and/or protein levels are decreased in a keratinocyte.

88. The method of any one of claims 79-87, wherein the synthetic oligonucleotide, the SNA, or the pharmaceutical composition ameliorate or eliminate one or more symptoms or conditions associated with the disease or disorder in the subject, and wherein the symptom or condition is at least one of erythroderma, xeroderma, desquamation, pruritus, skin infections, septicemia, inflammation, ichthyosis linearis circumflexa, bamboo hair, eczema, asthma, allergies, hypernatremia, and dehydration.

89. The method of any one of claims 79-88, further comprising the administration of a second therapeutic agent.

The application's sequence listing, which the Patent Office published only in electronic form, follows.

SEQUENCE LISTING (7851 sequences)

SEQ ID NO: 1 - DNA, 20 bp, Artificial Sequence
  Synthetic
ccuggccactgcctccuccu

SEQ ID NO: 2 - DNA, 20 bp, Artificial Sequence
  Synthetic
uccuggccactgcctccucc

SEQ ID NO: 3 - DNA, 20 bp, Artificial Sequence
  Synthetic
uuccuggccactgccuccuc

SEQ ID NO: 4 - DNA, 20 bp, Artificial Sequence
  Synthetic
cuucctggccactgccuccu

SEQ ID NO: 5 - DNA, 20 bp, Artificial Sequence
  Synthetic
ccuucctggccactgccucc

SEQ ID NO: 6 - DNA, 20 bp, Artificial Sequence
  Synthetic
gccuucctggccactgccuc

SEQ ID NO: 7 - DNA, 20 bp, Artificial Sequence
  Synthetic
ugccutcctggccacugccu

SEQ ID NO: 8 - DNA, 20 bp, Artificial Sequence
  Synthetic
gugccttcctggccacugcc

SEQ ID NO: 9 - DNA, 20 bp, Artificial Sequence
  Synthetic
ugugccttcctggccacugc

SEQ ID NO: 10 - DNA, 20 bp, Artificial Sequence
  Synthetic
cugugccttcctggccacug

SEQ ID NO: 11 - DNA, 20 bp, Artificial Sequence
  Synthetic
ccugugccttcctggccacu

SEQ ID NO: 12 - DNA, 20 bp, Artificial Sequence
  Synthetic
gccugtgccttcctggccac

SEQ ID NO: 13 - DNA, 20 bp, Artificial Sequence
  Synthetic
ggccugtgccttcctggcca

SEQ ID NO: 14 - DNA, 20 bp, Artificial Sequence
  Synthetic
aggcctgtgccttccuggcc

SEQ ID NO: 15 - DNA, 20 bp, Artificial Sequence
  Synthetic
caggcctgtgccttccuggc

SEQ ID NO: 16 - DNA, 20 bp, Artificial Sequence
  Synthetic
ucaggcctgtgccttccugg

SEQ ID NO: 17 - DNA, 20 bp, Artificial Sequence
  Synthetic
cucaggcctgtgcctuccug

SEQ ID NO: 18 - DNA, 20 bp, Artificial Sequence
  Synthetic
ucucaggcctgtgccuuccu

SEQ ID NO: 19 - DNA, 20 bp, Artificial Sequence
  Synthetic
uucucaggcctgtgccuucc

SEQ ID NO: 20 - DNA, 20 bp, Artificial Sequence
  Synthetic
cuucucaggcctgtgccuuc

SEQ ID NO: 21 - DNA, 20 bp, Artificial Sequence
  Synthetic
acuuctcaggcctgtgccuu

SEQ ID NO: 22 - DNA, 20 bp, Artificial Sequence
  Synthetic
gacuuctcaggcctgugccu

SEQ ID NO: 23 - DNA, 20 bp, Artificial Sequence
  Synthetic
agacutctcaggcctgugcc

SEQ ID NO: 24 - DNA, 20 bp, Artificial Sequence
  Synthetic
cagacttctcaggccugugc

SEQ ID NO: 25 - DNA, 20 bp, Artificial Sequence
  Synthetic
gcagacttctcaggccugug

SEQ ID NO: 26 - DNA, 20 bp, Artificial Sequence
  Synthetic
cgcagacttctcaggccugu

SEQ ID NO: 27 - DNA, 20 bp, Artificial Sequence
  Synthetic
ccgcagacttctcaggccug

SEQ ID NO: 28 - DNA, 20 bp, Artificial Sequence
  Synthetic
gccgcagacttctcaggccu

SEQ ID NO: 29 - DNA, 20 bp, Artificial Sequence
  Synthetic
agccgcagacttctcaggcc

SEQ ID NO: 30 - DNA, 20 bp, Artificial Sequence
  Synthetic
cagccgcagacttctcaggc

SEQ ID NO: 31 - DNA, 20 bp, Artificial Sequence
  Synthetic
ucagccgcagacttcucagg

SEQ ID NO: 32 - DNA, 20 bp, Artificial Sequence
  Synthetic
cucagccgcagacttcucag

SEQ ID NO: 33 - DNA, 20 bp, Artificial Sequence
  Synthetic
gcucagccgcagactucuca

SEQ ID NO: 34 - RNA, 20 nt, Artificial Sequence
  Synthetic
agcucagccgcagacuucuc

SEQ ID NO: 35 - RNA, 20 nt, Artificial Sequence
  Synthetic
cagcucagccgcagacuucu

SEQ ID NO: 36 - DNA, 20 bp, Artificial Sequence
  Synthetic
ccagctcagccgcagacuuc

SEQ ID NO: 37 - DNA, 20 bp, Artificial Sequence
  Synthetic
cccagctcagccgcagacuu

SEQ ID NO: 38 - DNA, 20 bp, Artificial Sequence
  Synthetic
ucccagctcagccgcagacu

SEQ ID NO: 39 - DNA, 20 bp, Artificial Sequence
  Synthetic
cucccagctcagccgcagac

SEQ ID NO: 40 - DNA, 20 bp, Artificial Sequence
  Synthetic
gcucccagctcagccgcaga

SEQ ID NO: 41 - DNA, 20 bp, Artificial Sequence
  Synthetic
ugcucccagctcagccgcag

SEQ ID NO: 42 - DNA, 20 bp, Artificial Sequence
  Synthetic
uugcucccagctcagccgca

SEQ ID NO: 43 - DNA, 20 bp, Artificial Sequence
  Synthetic
uuugctcccagctcagccgc

SEQ ID NO: 44 - DNA, 20 bp, Artificial Sequence
  Synthetic
auuugctcccagctcagccg

SEQ ID NO: 45 - DNA, 20 bp, Artificial Sequence
  Synthetic
gauuugctcccagctcagcc

SEQ ID NO: 46 - DNA, 20 bp, Artificial Sequence
  Synthetic
ggauutgctcccagcucagc

SEQ ID NO: 47 - DNA, 20 bp, Artificial Sequence
  Synthetic
gggauttgctcccagcucag

SEQ ID NO: 48 - DNA, 20 bp, Artificial Sequence
  Synthetic
ggggatttgctcccagcuca

SEQ ID NO: 49 - DNA, 20 bp, Artificial Sequence
  Synthetic
gggggatttgctcccagcuc

SEQ ID NO: 50 - DNA, 20 bp, Artificial Sequence
  Synthetic
ugggggatttgctcccagcu

SEQ ID NO: 51 - DNA, 20 bp, Artificial Sequence
  Synthetic
gugggggatttgctcccagc

SEQ ID NO: 52 - DNA, 20 bp, Artificial Sequence
  Synthetic
ggugggggatttgctcccag

SEQ ID NO: 53 - DNA, 20 bp, Artificial Sequence
  Synthetic
gggugggggatttgcuccca

SEQ ID NO: 54 - DNA, 20 bp, Artificial Sequence
  Synthetic
ggggugggggatttgcuccc

SEQ ID NO: 55 - DNA, 20 bp, Artificial Sequence
  Synthetic
gggggtgggggatttgcucc

SEQ ID NO: 56 - DNA, 20 bp, Artificial Sequence
  Synthetic
agggggtgggggattugcuc

SEQ ID NO: 57 - DNA, 20 bp, Artificial Sequence
  Synthetic
uagggggtgggggatuugcu

SEQ ID NO: 58 - DNA, 20 bp, Artificial Sequence
  Synthetic
guagggggtgggggauuugc

SEQ ID NO: 59 - DNA, 20 bp, Artificial Sequence
  Synthetic
gguagggggtgggggauuug

SEQ ID NO: 60 - DNA, 20 bp, Artificial Sequence
  Synthetic
agguagggggtgggggauuu

SEQ ID NO: 61 - DNA, 20 bp, Artificial Sequence
  Synthetic
cagguagggggtgggggauu

SEQ ID NO: 62 - DNA, 20 bp, Artificial Sequence
  Synthetic
ccaggtagggggtgggggau

SEQ ID NO: 63 - DNA, 20 bp, Artificial Sequence
  Synthetic
cccaggtagggggtggggga

SEQ ID NO: 64 - DNA, 20 bp, Artificial Sequence
  Synthetic
ccccaggtagggggtggggg

SEQ ID NO: 65 - DNA, 20 bp, Artificial Sequence
  Synthetic
cccccaggtagggggugggg

SEQ ID NO: 66 - DNA, 20 bp, Artificial Sequence
  Synthetic
ucccccaggtaggggguggg

SEQ ID NO: 67 - DNA, 20 bp, Artificial Sequence
  Synthetic
gucccccaggtagggggugg

SEQ ID NO: 68 - DNA, 20 bp, Artificial Sequence
  Synthetic
ugucccccaggtagggggug

SEQ ID NO: 69 - DNA, 20 bp, Artificial Sequence
  Synthetic
cugucccccaggtagggggu

SEQ ID NO: 70 - DNA, 20 bp, Artificial Sequence
  Synthetic
ccugucccccaggtaggggg

SEQ ID NO: 71 - DNA, 20 bp, Artificial Sequence
  Synthetic
cccugtcccccaggtagggg

SEQ ID NO: 72 - DNA, 20 bp, Artificial Sequence
  Synthetic
gcccugtcccccagguaggg

SEQ ID NO: 73 - DNA, 20 bp, Artificial Sequence
  Synthetic
ugccctgtcccccagguagg

SEQ ID NO: 74 - DNA, 20 bp, Artificial Sequence
  Synthetic
uugccctgtcccccagguag

SEQ ID NO: 75 - DNA, 20 bp, Artificial Sequence
  Synthetic
cuugccctgtcccccaggua

SEQ ID NO: 76 - DNA, 20 bp, Artificial Sequence
  Synthetic
acuugccctgtcccccaggu

SEQ ID NO: 77 - DNA, 20 bp, Artificial Sequence
  Synthetic
cacuugccctgtcccccagg

SEQ ID NO: 78 - DNA, 20 bp, Artificial Sequence
  Synthetic
ucacutgccctgtcccccag

SEQ ID NO: 79 - DNA, 20 bp, Artificial Sequence
  Synthetic
cucacttgccctgtccccca

SEQ ID NO: 80 - DNA, 20 bp, Artificial Sequence
  Synthetic
ucucacttgccctgtccccc

SEQ ID NO: 81 - DNA, 20 bp, Artificial Sequence
  Synthetic
gucucacttgccctgucccc

SEQ ID NO: 82 - DNA, 20 bp, Artificial Sequence
  Synthetic
ggucucacttgccctguccc

SEQ ID NO: 83 - DNA, 20 bp, Artificial Sequence
  Synthetic
agguctcacttgcccugucc

SEQ ID NO: 84 - DNA, 20 bp, Artificial Sequence
  Synthetic
cagguctcacttgcccuguc

SEQ ID NO: 85 - DNA, 20 bp, Artificial Sequence
  Synthetic
ccaggtctcacttgcccugu

SEQ ID NO: 86 - DNA, 20 bp, Artificial Sequence
  Synthetic
accaggtctcacttgcccug

SEQ ID NO: 87 - DNA, 20 bp, Artificial Sequence
  Synthetic
caccaggtctcacttgcccu

SEQ ID NO: 88 - DNA, 20 bp, Artificial Sequence
  Synthetic
ucaccaggtctcactugccc

SEQ ID NO: 89 - DNA, 20 bp, Artificial Sequence
  Synthetic
cucaccaggtctcacuugcc

SEQ ID NO: 90 - DNA, 20 bp, Artificial Sequence
  Synthetic
ccucaccaggtctcacuugc

SEQ ID NO: 91 - DNA, 20 bp, Artificial Sequence
  Synthetic
cccucaccaggtctcacuug

SEQ ID NO: 92 - DNA, 20 bp, Artificial Sequence
  Synthetic
acccucaccaggtctcacuu

SEQ ID NO: 93 - DNA, 20 bp, Artificial Sequence
  Synthetic
caccctcaccaggtcucacu

SEQ ID NO: 94 - DNA, 20 bp, Artificial Sequence
  Synthetic
ccaccctcaccaggtcucac

SEQ ID NO: 95 - DNA, 20 bp, Artificial Sequence
  Synthetic
gccaccctcaccaggucuca

SEQ ID NO: 96 - DNA, 20 bp, Artificial Sequence
  Synthetic
agccaccctcaccaggucuc

SEQ ID NO: 97 - DNA, 20 bp, Artificial Sequence
  Synthetic
gagccaccctcaccaggucu

SEQ ID NO: 98 - DNA, 20 bp, Artificial Sequence
  Synthetic
ugagccaccctcaccagguc

SEQ ID NO: 99 - DNA, 20 bp, Artificial Sequence
  Synthetic
cugagccaccctcaccaggu

SEQ ID NO: 100 - DNA, 20 bp, Artificial Sequence
  Synthetic
gcugagccaccctcaccagg

SEQ ID NO: 101 - DNA, 20 bp, Artificial Sequence
  Synthetic
ugcugagccaccctcaccag

SEQ ID NO: 102 - DNA, 20 bp, Artificial Sequence
  Synthetic
cugcugagccaccctcacca

SEQ ID NO: 103 - DNA, 20 bp, Artificial Sequence
  Synthetic
ccugctgagccacccucacc

SEQ ID NO: 104 - DNA, 20 bp, Artificial Sequence
  Synthetic
gccugctgagccacccucac

SEQ ID NO: 105 - DNA, 20 bp, Artificial Sequence
  Synthetic
ugccugctgagccacccuca

SEQ ID NO: 106 - DNA, 20 bp, Artificial Sequence
  Synthetic
cugcctgctgagccacccuc

SEQ ID NO: 107 - DNA, 20 bp, Artificial Sequence
  Synthetic
ccugcctgctgagccacccu

SEQ ID NO: 108 - DNA, 20 bp, Artificial Sequence
  Synthetic
cccugcctgctgagccaccc

SEQ ID NO: 109 - DNA, 20 bp, Artificial Sequence
  Synthetic
ucccugcctgctgagccacc

SEQ ID NO: 110 - DNA, 20 bp, Artificial Sequence
  Synthetic
uuccctgcctgctgagccac

SEQ ID NO: 111 - DNA, 20 bp, Artificial Sequence
  Synthetic
cuuccctgcctgctgagcca

SEQ ID NO: 112 - DNA, 20 bp, Artificial Sequence
  Synthetic
ccuuccctgcctgctgagcc

SEQ ID NO: 113 - DNA, 20 bp, Artificial Sequence
  Synthetic
uccuuccctgcctgcugagc

SEQ ID NO: 114 - DNA, 20 bp, Artificial Sequence
  Synthetic
cuccutccctgcctgcugag

SEQ ID NO: 115 - DNA, 20 bp, Artificial Sequence
  Synthetic
ucuccttccctgcctgcuga

SEQ ID NO: 116 - DNA, 20 bp, Artificial Sequence
  Synthetic
cucuccttccctgccugcug

SEQ ID NO: 117 - DNA, 20 bp, Artificial Sequence
  Synthetic
ccucuccttccctgccugcu

SEQ ID NO: 118 - DNA, 20 bp, Artificial Sequence
  Synthetic
accuctccttccctgccugc

SEQ ID NO: 119 - DNA, 20 bp, Artificial Sequence
  Synthetic
caccuctccttccctgccug

SEQ ID NO: 120 - DNA, 20 bp, Artificial Sequence
  Synthetic
acacctctccttcccugccu

SEQ ID NO: 121 - DNA, 20 bp, Artificial Sequence
  Synthetic
gacacctctccttcccugcc

SEQ ID NO: 122 - DNA, 20 bp, Artificial Sequence
  Synthetic
agacacctctccttcccugc

SEQ ID NO: 123 - DNA, 20 bp, Artificial Sequence
  Synthetic
cagacacctctccttcccug

SEQ ID NO: 124 - DNA, 20 bp, Artificial Sequence
  Synthetic
acagacacctctcctucccu

SEQ ID NO: 125 - DNA, 20 bp, Artificial Sequence
  Synthetic
cacagacacctctccuuccc

SEQ ID NO: 126 - DNA, 20 bp, Artificial Sequence
  Synthetic
gcacagacacctctccuucc

SEQ ID NO: 127 - DNA, 20 bp, Artificial Sequence
  Synthetic
cgcacagacacctctccuuc

SEQ ID NO: 128 - DNA, 20 bp, Artificial Sequence
  Synthetic
acgcacagacacctcuccuu

SEQ ID NO: 129 - DNA, 20 bp, Artificial Sequence
  Synthetic
gacgcacagacacctcuccu

SEQ ID NO: 130 - RNA, 20 nt, Artificial Sequence
  Synthetic
ggacgcacagacaccucucc

SEQ ID NO: 131 - RNA, 20 nt, Artificial Sequence
  Synthetic
aggacgcacagacaccucuc

SEQ ID NO: 132 - RNA, 20 nt, Artificial Sequence
  Synthetic
caggacgcacagacaccucu

SEQ ID NO: 133 - RNA, 20 nt, Artificial Sequence
  Synthetic
gcaggacgcacagacaccuc

SEQ ID NO: 134 - RNA, 20 nt, Artificial Sequence
  Synthetic
ugcaggacgcacagacaccu

SEQ ID NO: 135 - RNA, 20 nt, Artificial Sequence
  Synthetic
gugcaggacgcacagacacc

SEQ ID NO: 136 - RNA, 20 nt, Artificial Sequence
  Synthetic
ggugcaggacgcacagacac

SEQ ID NO: 137 - RNA, 20 nt, Artificial Sequence
  Synthetic
gggugcaggacgcacagaca

SEQ ID NO: 138 - RNA, 20 nt, Artificial Sequence
  Synthetic
ugggugcaggacgcacagac

SEQ ID NO: 139 - DNA, 20 bp, Artificial Sequence
  Synthetic
gugggtgcaggacgcacaga

SEQ ID NO: 140 - DNA, 20 bp, Artificial Sequence
  Synthetic
ugugggtgcaggacgcacag

SEQ ID NO: 141 - DNA, 20 bp, Artificial Sequence
  Synthetic
augugggtgcaggacgcaca

SEQ ID NO: 142 - DNA, 20 bp, Artificial Sequence
  Synthetic
gaugugggtgcaggacgcac

SEQ ID NO: 143 - DNA, 20 bp, Artificial Sequence
  Synthetic
agaugtgggtgcaggacgca

SEQ ID NO: 144 - DNA, 20 bp, Artificial Sequence
  Synthetic
aagaugtgggtgcaggacgc

SEQ ID NO: 145 - DNA, 20 bp, Artificial Sequence
  Synthetic
aaagatgtgggtgcaggacg

SEQ ID NO: 146 - DNA, 20 bp, Artificial Sequence
  Synthetic
gaaagatgtgggtgcaggac

SEQ ID NO: 147 - DNA, 20 bp, Artificial Sequence
  Synthetic
agaaagatgtgggtgcagga

SEQ ID NO: 148 - DNA, 20 bp, Artificial Sequence
  Synthetic
gagaaagatgtgggtgcagg

SEQ ID NO: 149 - DNA, 20 bp, Artificial Sequence
  Synthetic
agagaaagatgtgggugcag

SEQ ID NO: 150 - DNA, 20 bp, Artificial Sequence
  Synthetic
cagagaaagatgtgggugca

SEQ ID NO: 151 - DNA, 20 bp, Artificial Sequence
  Synthetic
acagagaaagatgtgggugc

SEQ ID NO: 152 - DNA, 20 bp, Artificial Sequence
  Synthetic
gacagagaaagatgtgggug

SEQ ID NO: 153 - DNA, 20 bp, Artificial Sequence
  Synthetic
ggacagagaaagatgugggu

SEQ ID NO: 154 - DNA, 20 bp, Artificial Sequence
  Synthetic
gggacagagaaagatguggg

SEQ ID NO: 155 - RNA, 20 nt, Artificial Sequence
  Synthetic
ggggacagagaaagaugugg

SEQ ID NO: 156 - RNA, 20 nt, Artificial Sequence
  Synthetic
aggggacagagaaagaugug

SEQ ID NO: 157 - RNA, 20 nt, Artificial Sequence
  Synthetic
gaggggacagagaaagaugu

SEQ ID NO: 158 - RNA, 20 nt, Artificial Sequence
  Synthetic
ggaggggacagagaaagaug

SEQ ID NO: 159 - RNA, 20 nt, Artificial Sequence
  Synthetic
aggaggggacagagaaagau

SEQ ID NO: 160 - DNA, 20 bp, Artificial Sequence
  Synthetic
aaggaggggacagagaaaga

SEQ ID NO: 161 - DNA, 20 bp, Artificial Sequence
  Synthetic
caaggaggggacagagaaag

SEQ ID NO: 162 - DNA, 20 bp, Artificial Sequence
  Synthetic
gcaaggaggggacagagaaa

SEQ ID NO: 163 - DNA, 20 bp, Artificial Sequence
  Synthetic
ggcaaggaggggacagagaa

SEQ ID NO: 164 - DNA, 20 bp, Artificial Sequence
  Synthetic
gggcaaggaggggacagaga

SEQ ID NO: 165 - DNA, 20 bp, Artificial Sequence
  Synthetic
agggcaaggaggggacagag

SEQ ID NO: 166 - DNA, 20 bp, Artificial Sequence
  Synthetic
cagggcaaggaggggacaga

SEQ ID NO: 167 - DNA, 20 bp, Artificial Sequence
  Synthetic
acagggcaaggaggggacag

SEQ ID NO: 168 - DNA, 20 bp, Artificial Sequence
  Synthetic
gacagggcaaggaggggaca

SEQ ID NO: 169 - DNA, 20 bp, Artificial Sequence
  Synthetic
agacagggcaaggaggggac

SEQ ID NO: 170 - DNA, 20 bp, Artificial Sequence
  Synthetic
cagacagggcaaggagggga

SEQ ID NO: 171 - DNA, 20 bp, Artificial Sequence
  Synthetic
ccagacagggcaaggagggg

SEQ ID NO: 172 - RNA, 20 nt, Artificial Sequence
  Synthetic
uccagacagggcaaggaggg

SEQ ID NO: 173 - RNA, 20 nt, Artificial Sequence
  Synthetic
cuccagacagggcaaggagg

SEQ ID NO: 174 - RNA, 20 nt, Artificial Sequence
  Synthetic
ccuccagacagggcaaggag

SEQ ID NO: 175 - RNA, 20 nt, Artificial Sequence
  Synthetic
gccuccagacagggcaagga

SEQ ID NO: 176 - RNA, 20 nt, Artificial Sequence
  Synthetic
agccuccagacagggcaagg

SEQ ID NO: 177 - DNA, 20 bp, Artificial Sequence
  Synthetic
cagcctccagacagggcaag

SEQ ID NO: 178 - DNA, 20 bp, Artificial Sequence
  Synthetic
gcagcctccagacagggcaa

SEQ ID NO: 179 - DNA, 20 bp, Artificial Sequence
  Synthetic
agcagcctccagacagggca

SEQ ID NO: 180 - DNA, 20 bp, Artificial Sequence
  Synthetic
uagcagcctccagacagggc

SEQ ID NO: 181 - DNA, 20 bp, Artificial Sequence
  Synthetic
cuagcagcctccagacaggg

SEQ ID NO: 182 - DNA, 20 bp, Artificial Sequence
  Synthetic
ucuagcagcctccagacagg

SEQ ID NO: 183 - DNA, 20 bp, Artificial Sequence
  Synthetic
gucuagcagcctccagacag

SEQ ID NO: 184 - DNA, 20 bp, Artificial Sequence
  Synthetic
agucuagcagcctccagaca

SEQ ID NO: 185 - DNA, 20 bp, Artificial Sequence
  Synthetic
gaguctagcagcctccagac

SEQ ID NO: 186 - DNA, 20 bp, Artificial Sequence
  Synthetic
ggaguctagcagcctccaga

SEQ ID NO: 187 - DNA, 20 bp, Artificial Sequence
  Synthetic
aggagtctagcagccuccag

SEQ ID NO: 188 - DNA, 20 bp, Artificial Sequence
  Synthetic
uaggagtctagcagccucca

SEQ ID NO: 189 - DNA, 20 bp, Artificial Sequence
  Synthetic
auaggagtctagcagccucc

SEQ ID NO: 190 - DNA, 20 bp, Artificial Sequence
  Synthetic
gauaggagtctagcagccuc

SEQ ID NO: 191 - DNA, 20 bp, Artificial Sequence
  Synthetic
agauaggagtctagcagccu

SEQ ID NO: 192 - DNA, 20 bp, Artificial Sequence
  Synthetic
aagauaggagtctagcagcc

SEQ ID NO: 193 - DNA, 20 bp, Artificial Sequence
  Synthetic
gaagataggagtctagcagc

SEQ ID NO: 194 - DNA, 20 bp, Artificial Sequence
  Synthetic
agaagataggagtctagcag

SEQ ID NO: 195 - DNA, 20 bp, Artificial Sequence
  Synthetic
cagaagataggagtcuagca

SEQ ID NO: 196 - DNA, 20 bp, Artificial Sequence
  Synthetic
ucagaagataggagtcuagc

SEQ ID NO: 197 - DNA, 20 bp, Artificial Sequence
  Synthetic
uucagaagataggagucuag

SEQ ID NO: 198 - DNA, 20 bp, Artificial Sequence
  Synthetic
auucagaagataggagucua

SEQ ID NO: 199 - DNA, 20 bp, Artificial Sequence
  Synthetic
aauucagaagataggagucu

SEQ ID NO: 200 - DNA, 20 bp, Artificial Sequence
  Synthetic
gaauucagaagataggaguc

SEQ ID NO: 201 - DNA, 20 bp, Artificial Sequence
  Synthetic
agaautcagaagataggagu

SEQ ID NO: 202 - DNA, 20 bp, Artificial Sequence
  Synthetic
uagaattcagaagataggag

SEQ ID NO: 203 - DNA, 20 bp, Artificial Sequence
  Synthetic
auagaattcagaagauagga

SEQ ID NO: 204 - DNA, 20 bp, Artificial Sequence
  Synthetic
uauagaattcagaagauagg

SEQ ID NO: 205 - DNA, 20 bp, Artificial Sequence
  Synthetic
cuauagaattcagaagauag

SEQ ID NO: 206 - DNA, 20 bp, Artificial Sequence
  Synthetic
acuauagaattcagaagaua

SEQ ID NO: 207 - DNA, 20 bp, Artificial Sequence
  Synthetic
cacuatagaattcagaagau

SEQ ID NO: 208 - DNA, 20 bp, Artificial Sequence
  Synthetic
gcacuatagaattcagaaga

SEQ ID NO: 209 - DNA, 20 bp, Artificial Sequence
  Synthetic
ggcactatagaattcagaag

SEQ ID NO: 210 - DNA, 20 bp, Artificial Sequence
  Synthetic
aggcactatagaattcagaa

SEQ ID NO: 211 - DNA, 20 bp, Artificial Sequence
  Synthetic
caggcactatagaatucaga

SEQ ID NO: 212 - DNA, 20 bp, Artificial Sequence
  Synthetic
ccaggcactatagaauucag

SEQ ID NO: 213 - DNA, 20 bp, Artificial Sequence
  Synthetic
cccaggcactatagaauuca

SEQ ID NO: 214 - DNA, 20 bp, Artificial Sequence
  Synthetic
acccaggcactatagaauuc

SEQ ID NO: 215 - DNA, 20 bp, Artificial Sequence
  Synthetic
gacccaggcactatagaauu

SEQ ID NO: 216 - DNA, 20 bp, Artificial Sequence
  Synthetic
agacccaggcactatagaau

SEQ ID NO: 217 - DNA, 20 bp, Artificial Sequence
  Synthetic
gagacccaggcactauagaa

SEQ ID NO: 218 - DNA, 20 bp, Artificial Sequence
  Synthetic
ugagacccaggcactauaga

SEQ ID NO: 219 - RNA, 20 nt, Artificial Sequence
  Synthetic
cugagacccaggcacuauag

SEQ ID NO: 220 - RNA, 20 nt, Artificial Sequence
  Synthetic
gcugagacccaggcacuaua

SEQ ID NO: 221 - RNA, 20 nt, Artificial Sequence
  Synthetic
cgcugagacccaggcacuau

SEQ ID NO: 222 - RNA, 20 nt, Artificial Sequence
  Synthetic
gcgcugagacccaggcacua

SEQ ID NO: 223 - DNA, 20 bp, Artificial Sequence
  Synthetic
ugcgctgagacccaggcacu

SEQ ID NO: 224 - DNA, 20 bp, Artificial Sequence
  Synthetic
cugcgctgagacccaggcac

SEQ ID NO: 225 - DNA, 20 bp, Artificial Sequence
  Synthetic
acugcgctgagacccaggca

SEQ ID NO: 226 - DNA, 20 bp, Artificial Sequence
  Synthetic
cacugcgctgagacccaggc

SEQ ID NO: 227 - DNA, 20 bp, Artificial Sequence
  Synthetic
gcacugcgctgagacccagg

SEQ ID NO: 228 - DNA, 20 bp, Artificial Sequence
  Synthetic
ggcactgcgctgagacccag

SEQ ID NO: 229 - DNA, 20 bp, Artificial Sequence
  Synthetic
cggcactgcgctgagaccca

SEQ ID NO: 230 - DNA, 20 bp, Artificial Sequence
  Synthetic
ucggcactgcgctgagaccc

SEQ ID NO: 231 - DNA, 20 bp, Artificial Sequence
  Synthetic
aucggcactgcgctgagacc

SEQ ID NO: 232 - DNA, 20 bp, Artificial Sequence
  Synthetic
caucggcactgcgctgagac

SEQ ID NO: 233 - DNA, 20 bp, Artificial Sequence
  Synthetic
ccaucggcactgcgcugaga

SEQ ID NO: 234 - DNA, 20 bp, Artificial Sequence
  Synthetic
accaucggcactgcgcugag

SEQ ID NO: 235 - DNA, 20 bp, Artificial Sequence
  Synthetic
caccatcggcactgcgcuga

SEQ ID NO: 236 - DNA, 20 bp, Artificial Sequence
  Synthetic
ccaccatcggcactgcgcug

SEQ ID NO: 237 - DNA, 20 bp, Artificial Sequence
  Synthetic
gccaccatcggcactgcgcu

SEQ ID NO: 238 - DNA, 20 bp, Artificial Sequence
  Synthetic
ggccaccatcggcacugcgc

SEQ ID NO: 239 - DNA, 20 bp, Artificial Sequence
  Synthetic
gggccaccatcggcacugcg

SEQ ID NO: 240 - DNA, 20 bp, Artificial Sequence
  Synthetic
cgggccaccatcggcacugc

SEQ ID NO: 241 - DNA, 20 bp, Artificial Sequence
  Synthetic
acgggccaccatcggcacug

SEQ ID NO: 242 - DNA, 20 bp, Artificial Sequence
  Synthetic
gacgggccaccatcggcacu

SEQ ID NO: 243 - DNA, 20 bp, Artificial Sequence
  Synthetic
ggacgggccaccatcggcac

SEQ ID NO: 244 - DNA, 20 bp, Artificial Sequence
  Synthetic
aggacgggccaccatcggca

SEQ ID NO: 245 - RNA, 20 nt, Artificial Sequence
  Synthetic
aaggacgggccaccaucggc

SEQ ID NO: 246 - RNA, 20 nt, Artificial Sequence
  Synthetic
caaggacgggccaccaucgg

SEQ ID NO: 247 - RNA, 20 nt, Artificial Sequence
  Synthetic
acaaggacgggccaccaucg

SEQ ID NO: 248 - RNA, 20 nt, Artificial Sequence
  Synthetic
cacaaggacgggccaccauc

SEQ ID NO: 249 - RNA, 20 nt, Artificial Sequence
  Synthetic
ccacaaggacgggccaccau

SEQ ID NO: 250 - DNA, 20 bp, Artificial Sequence
  Synthetic
accacaaggacgggccacca

SEQ ID NO: 251 - DNA, 20 bp, Artificial Sequence
  Synthetic
aaccacaaggacgggccacc

SEQ ID NO: 252 - DNA, 20 bp, Artificial Sequence
  Synthetic
gaaccacaaggacgggccac

SEQ ID NO: 253 - DNA, 20 bp, Artificial Sequence
  Synthetic
ggaaccacaaggacgggcca

SEQ ID NO: 254 - DNA, 20 bp, Artificial Sequence
  Synthetic
aggaaccacaaggacgggcc

SEQ ID NO: 255 - DNA, 20 bp, Artificial Sequence
  Synthetic
gaggaaccacaaggacgggc

SEQ ID NO: 256 - DNA, 20 bp, Artificial Sequence
  Synthetic
agaggaaccacaaggacggg

SEQ ID NO: 257 - DNA, 20 bp, Artificial Sequence
  Synthetic
gagaggaaccacaaggacgg

SEQ ID NO: 258 - DNA, 20 bp, Artificial Sequence
  Synthetic
agagaggaaccacaaggacg

SEQ ID NO: 259 - RNA, 20 nt, Artificial Sequence
  Synthetic
uagagaggaaccacaaggac

SEQ ID NO: 260 - RNA, 20 nt, Artificial Sequence
  Synthetic
guagagaggaaccacaagga

SEQ ID NO: 261 - RNA, 20 nt, Artificial Sequence
  Synthetic
gguagagaggaaccacaagg

SEQ ID NO: 262 - RNA, 20 nt, Artificial Sequence
  Synthetic
agguagagaggaaccacaag

SEQ ID NO: 263 - RNA, 20 nt, Artificial Sequence
  Synthetic
cagguagagaggaaccacaa

SEQ ID NO: 264 - DNA, 20 bp, Artificial Sequence
  Synthetic
ccaggtagagaggaaccaca

SEQ ID NO: 265 - DNA, 20 bp, Artificial Sequence
  Synthetic
cccaggtagagaggaaccac

SEQ ID NO: 266 - DNA, 20 bp, Artificial Sequence
  Synthetic
ccccaggtagagaggaacca

SEQ ID NO: 267 - DNA, 20 bp, Artificial Sequence
  Synthetic
uccccaggtagagaggaacc

SEQ ID NO: 268 - DNA, 20 bp, Artificial Sequence
  Synthetic
uuccccaggtagagaggaac

SEQ ID NO: 269 - DNA, 20 bp, Artificial Sequence
  Synthetic
uuuccccaggtagagaggaa

SEQ ID NO: 270 - DNA, 20 bp, Artificial Sequence
  Synthetic
auuuccccaggtagagagga

SEQ ID NO: 271 - DNA, 20 bp, Artificial Sequence
  Synthetic
uauuuccccaggtagagagg

SEQ ID NO: 272 - DNA, 20 bp, Artificial Sequence
  Synthetic
uuauutccccaggtagagag

SEQ ID NO: 273 - DNA, 20 bp, Artificial Sequence
  Synthetic
cuuauttccccaggtagaga

SEQ ID NO: 274 - DNA, 20 bp, Artificial Sequence
  Synthetic
ccuuatttccccagguagag

SEQ ID NO: 275 - DNA, 20 bp, Artificial Sequence
  Synthetic
accuuatttccccagguaga

SEQ ID NO: 276 - DNA, 20 bp, Artificial Sequence
  Synthetic
caccutatttccccagguag

SEQ ID NO: 277 - DNA, 20 bp, Artificial Sequence
  Synthetic
gcaccttatttccccaggua

SEQ ID NO: 278 - DNA, 20 bp, Artificial Sequence
  Synthetic
ugcaccttatttccccaggu

SEQ ID NO: 279 - DNA, 20 bp, Artificial Sequence
  Synthetic
cugcaccttatttccccagg

SEQ ID NO: 280 - DNA, 20 bp, Artificial Sequence
  Synthetic
gcugcaccttatttccccag

SEQ ID NO: 281 - DNA, 20 bp, Artificial Sequence
  Synthetic
cgcugcaccttatttcccca

SEQ ID NO: 282 - DNA, 20 bp, Artificial Sequence
  Synthetic
ccgcugcaccttattucccc

SEQ ID NO: 283 - DNA, 20 bp, Artificial Sequence
  Synthetic
gccgctgcaccttatuuccc

SEQ ID NO: 284 - DNA, 20 bp, Artificial Sequence
  Synthetic
ggccgctgcaccttauuucc

SEQ ID NO: 285 - DNA, 20 bp, Artificial Sequence
  Synthetic
uggccgctgcaccttauuuc

SEQ ID NO: 286 - DNA, 20 bp, Artificial Sequence
  Synthetic
auggccgctgcacctuauuu

SEQ ID NO: 287 - DNA, 20 bp, Artificial Sequence
  Synthetic
cauggccgctgcaccuuauu

SEQ ID NO: 288 - DNA, 20 bp, Artificial Sequence
  Synthetic
ccauggccgctgcaccuuau

SEQ ID NO: 289 - DNA, 20 bp, Artificial Sequence
  Synthetic
gccauggccgctgcaccuua

SEQ ID NO: 290 - DNA, 20 bp, Artificial Sequence
  Synthetic
agccatggccgctgcaccuu

SEQ ID NO: 291 - DNA, 20 bp, Artificial Sequence
  Synthetic
uagccatggccgctgcaccu

SEQ ID NO: 292 - DNA, 20 bp, Artificial Sequence
  Synthetic
guagccatggccgctgcacc

SEQ ID NO: 293 - DNA, 20 bp, Artificial Sequence
  Synthetic
uguagccatggccgcugcac

SEQ ID NO: 294 - DNA, 20 bp, Artificial Sequence
  Synthetic
cuguagccatggccgcugca

SEQ ID NO: 295 - DNA, 20 bp, Artificial Sequence
  Synthetic
gcuguagccatggccgcugc

SEQ ID NO: 296 - DNA, 20 bp, Artificial Sequence
  Synthetic
ugcugtagccatggccgcug

SEQ ID NO: 297 - DNA, 20 bp, Artificial Sequence
  Synthetic
uugcugtagccatggccgcu

SEQ ID NO: 298 - DNA, 20 bp, Artificial Sequence
  Synthetic
cuugctgtagccatggccgc

SEQ ID NO: 299 - DNA, 20 bp, Artificial Sequence
  Synthetic
ucuugctgtagccatggccg

SEQ ID NO: 300 - DNA, 20 bp, Artificial Sequence
  Synthetic
gucuugctgtagccauggcc

SEQ ID NO: 301 - DNA, 20 bp, Artificial Sequence
  Synthetic
ggucutgctgtagccauggc

SEQ ID NO: 302 - DNA, 20 bp, Artificial Sequence
  Synthetic
gggucttgctgtagccaugg

SEQ ID NO: 303 - DNA, 20 bp, Artificial Sequence
  Synthetic
ggggucttgctgtagccaug

SEQ ID NO: 304 - DNA, 20 bp, Artificial Sequence
  Synthetic
gggggtcttgctgtagccau

SEQ ID NO: 305 - DNA, 20 bp, Artificial Sequence
  Synthetic
ggggggtcttgctgtagcca

SEQ ID NO: 306 - DNA, 20 bp, Artificial Sequence
  Synthetic
aggggggtcttgctguagcc

SEQ ID NO: 307 - DNA, 20 bp, Artificial Sequence
  Synthetic
caggggggtcttgctguagc

SEQ ID NO: 308 - DNA, 20 bp, Artificial Sequence
  Synthetic
ccaggggggtcttgcuguag

SEQ ID NO: 309 - DNA, 20 bp, Artificial Sequence
  Synthetic
uccaggggggtcttgcugua

SEQ ID NO: 310 - DNA, 20 bp, Artificial Sequence
  Synthetic
auccaggggggtcttgcugu

SEQ ID NO: 311 - DNA, 20 bp, Artificial Sequence
  Synthetic
cauccaggggggtctugcug

SEQ ID NO: 312 - DNA, 20 bp, Artificial Sequence
  Synthetic
acauccaggggggtcuugcu

SEQ ID NO: 313 - DNA, 20 bp, Artificial Sequence
  Synthetic
cacauccaggggggtcuugc

SEQ ID NO: 314 - DNA, 20 bp, Artificial Sequence
  Synthetic
ccacatccaggggggucuug

SEQ ID NO: 315 - DNA, 20 bp, Artificial Sequence
  Synthetic
cccacatccaggggggucuu

SEQ ID NO: 316 - DNA, 20 bp, Artificial Sequence
  Synthetic
acccacatccaggggggucu

SEQ ID NO: 317 - DNA, 20 bp, Artificial Sequence
  Synthetic
cacccacatccagggggguc

SEQ ID NO: 318 - DNA, 20 bp, Artificial Sequence
  Synthetic
gcacccacatccaggggggu

SEQ ID NO: 319 - DNA, 20 bp, Artificial Sequence
  Synthetic
agcacccacatccagggggg

SEQ ID NO: 320 - DNA, 20 bp, Artificial Sequence
  Synthetic
gagcacccacatccaggggg

SEQ ID NO: 321 - DNA, 20 bp, Artificial Sequence
  Synthetic
agagcacccacatccagggg

SEQ ID NO: 322 - DNA, 20 bp, Artificial Sequence
  Synthetic
cagagcacccacatccaggg

SEQ ID NO: 323 - DNA, 20 bp, Artificial Sequence
  Synthetic
acagagcacccacatccagg

SEQ ID NO: 324 - RNA, 20 nt, Artificial Sequence
  Synthetic
cacagagcacccacauccag

SEQ ID NO: 325 - RNA, 20 nt, Artificial Sequence
  Synthetic
gcacagagcacccacaucca

SEQ ID NO: 326 - RNA, 20 nt, Artificial Sequence
  Synthetic
agcacagagcacccacaucc

SEQ ID NO: 327 - RNA, 20 nt, Artificial Sequence
  Synthetic
gagcacagagcacccacauc

SEQ ID NO: 328 - RNA, 20 nt, Artificial Sequence
  Synthetic
agagcacagagcacccacau

SEQ ID NO: 329 - DNA, 20 bp, Artificial Sequence
  Synthetic
cagagcacagagcacccaca

SEQ ID NO: 330 - RNA, 20 nt, Artificial Sequence
  Synthetic
ucagagcacagagcacccac

SEQ ID NO: 331 - RNA, 20 nt, Artificial Sequence
  Synthetic
aucagagcacagagcaccca

SEQ ID NO: 332 - RNA, 20 nt, Artificial Sequence
  Synthetic
gaucagagcacagagcaccc

SEQ ID NO: 333 - RNA, 20 nt, Artificial Sequence
  Synthetic
ugaucagagcacagagcacc

SEQ ID NO: 334 - RNA, 20 nt, Artificial Sequence
  Synthetic
gugaucagagcacagagcac

SEQ ID NO: 335 - DNA, 20 bp, Artificial Sequence
  Synthetic
ugugatcagagcacagagca

SEQ ID NO: 336 - DNA, 20 bp, Artificial Sequence
  Synthetic
cugugatcagagcacagagc

SEQ ID NO: 337 - DNA, 20 bp, Artificial Sequence
  Synthetic
gcugugatcagagcacagag

SEQ ID NO: 338 - DNA, 20 bp, Artificial Sequence
  Synthetic
ggcugtgatcagagcacaga

SEQ ID NO: 339 - DNA, 20 bp, Artificial Sequence
  Synthetic
aggcugtgatcagagcacag

SEQ ID NO: 340 - DNA, 20 bp, Artificial Sequence
  Synthetic
aaggctgtgatcagagcaca

SEQ ID NO: 341 - DNA, 20 bp, Artificial Sequence
  Synthetic
caaggctgtgatcagagcac

SEQ ID NO: 342 - DNA, 20 bp, Artificial Sequence
  Synthetic
gcaaggctgtgatcagagca

SEQ ID NO: 343 - DNA, 20 bp, Artificial Sequence
  Synthetic
agcaaggctgtgatcagagc

SEQ ID NO: 344 - DNA, 20 bp, Artificial Sequence
  Synthetic
aagcaaggctgtgatcagag

SEQ ID NO: 345 - DNA, 20 bp, Artificial Sequence
  Synthetic
gaagcaaggctgtgaucaga

SEQ ID NO: 346 - DNA, 20 bp, Artificial Sequence
  Synthetic
agaagcaaggctgtgaucag

SEQ ID NO: 347 - DNA, 20 bp, Artificial Sequence
  Synthetic
cagaagcaaggctgtgauca

SEQ ID NO: 348 - DNA, 20 bp, Artificial Sequence
  Synthetic
ccagaagcaaggctgugauc

SEQ ID NO: 349 - DNA, 20 bp, Artificial Sequence
  Synthetic
cccagaagcaaggctgugau

SEQ ID NO: 350 - RNA, 20 nt, Artificial Sequence
  Synthetic
ccccagaagcaaggcuguga

SEQ ID NO: 351 - RNA, 20 nt, Artificial Sequence
  Synthetic
cccccagaagcaaggcugug

SEQ ID NO: 352 - RNA, 20 nt, Artificial Sequence
  Synthetic
acccccagaagcaaggcugu

SEQ ID NO: 353 - RNA, 20 nt, Artificial Sequence
  Synthetic
gacccccagaagcaaggcug

SEQ ID NO: 354 - RNA, 20 nt, Artificial Sequence
  Synthetic
ugacccccagaagcaaggcu

SEQ ID NO: 355 - RNA, 20 nt, Artificial Sequence
  Synthetic
gugacccccagaagcaaggc

SEQ ID NO: 356 - RNA, 20 nt, Artificial Sequence
  Synthetic
ugugacccccagaagcaagg

SEQ ID NO: 357 - RNA, 20 nt, Artificial Sequence
  Synthetic
cugugacccccagaagcaag

SEQ ID NO: 358 - RNA, 20 nt, Artificial Sequence
  Synthetic
ucugugacccccagaagcaa

SEQ ID NO: 359 - DNA, 20 bp, Artificial Sequence
  Synthetic
cucugtgacccccagaagca

SEQ ID NO: 360 - DNA, 20 bp, Artificial Sequence
  Synthetic
gcucugtgacccccagaagc

SEQ ID NO: 361 - DNA, 20 bp, Artificial Sequence
  Synthetic
ugcuctgtgacccccagaag

SEQ ID NO: 362 - DNA, 20 bp, Artificial Sequence
  Synthetic
augcuctgtgacccccagaa

SEQ ID NO: 363 - DNA, 20 bp, Artificial Sequence
  Synthetic
caugctctgtgacccccaga

SEQ ID NO: 364 - DNA, 20 bp, Artificial Sequence
  Synthetic
acaugctctgtgacccccag

SEQ ID NO: 365 - DNA, 20 bp, Artificial Sequence
  Synthetic
aacaugctctgtgaccccca

SEQ ID NO: 366 - DNA, 20 bp, Artificial Sequence
  Synthetic
gaacatgctctgtgaccccc

SEQ ID NO: 367 - DNA, 20 bp, Artificial Sequence
  Synthetic
agaacatgctctgtgacccc

SEQ ID NO: 368 - DNA, 20 bp, Artificial Sequence
  Synthetic
gagaacatgctctgtgaccc

SEQ ID NO: 369 - DNA, 20 bp, Artificial Sequence
  Synthetic
cgagaacatgctctgugacc

SEQ ID NO: 370 - DNA, 20 bp, Artificial Sequence
  Synthetic
gcgagaacatgctctgugac

SEQ ID NO: 371 - DNA, 20 bp, Artificial Sequence
  Synthetic
ggcgagaacatgctcuguga

SEQ ID NO: 372 - DNA, 20 bp, Artificial Sequence
  Synthetic
uggcgagaacatgctcugug

SEQ ID NO: 373 - DNA, 20 bp, Artificial Sequence
  Synthetic
uuggcgagaacatgcucugu

SEQ ID NO: 374 - DNA, 20 bp, Artificial Sequence
  Synthetic
guuggcgagaacatgcucug

SEQ ID NO: 375 - DNA, 20 bp, Artificial Sequence
  Synthetic
uguuggcgagaacatgcucu

SEQ ID NO: 376 - RNA, 20 nt, Artificial Sequence
  Synthetic
uuguuggcgagaacaugcuc

SEQ ID NO: 377 - DNA, 20 bp, Artificial Sequence
  Synthetic
auugutggcgagaacaugcu

SEQ ID NO: 378 - DNA, 20 bp, Artificial Sequence
  Synthetic
cauugttggcgagaacaugc

SEQ ID NO: 379 - DNA, 20 bp, Artificial Sequence
  Synthetic
ucauugttggcgagaacaug

SEQ ID NO: 380 - DNA, 20 bp, Artificial Sequence
  Synthetic
aucautgttggcgagaacau

SEQ ID NO: 381 - DNA, 20 bp, Artificial Sequence
  Synthetic
caucattgttggcgagaaca

SEQ ID NO: 382 - DNA, 20 bp, Artificial Sequence
  Synthetic
acaucattgttggcgagaac

SEQ ID NO: 383 - DNA, 20 bp, Artificial Sequence
  Synthetic
aacaucattgttggcgagaa

SEQ ID NO: 384 - DNA, 20 bp, Artificial Sequence
  Synthetic
aaacatcattgttggcgaga

SEQ ID NO: 385 - DNA, 20 bp, Artificial Sequence
  Synthetic
gaaacatcattgttggcgag

SEQ ID NO: 386 - DNA, 20 bp, Artificial Sequence
  Synthetic
ggaaacatcattgttggcga

SEQ ID NO: 387 - DNA, 20 bp, Artificial Sequence
  Synthetic
aggaaacatcattgtuggcg

SEQ ID NO: 388 - DNA, 20 bp, Artificial Sequence
  Synthetic
caggaaacatcattguuggc

SEQ ID NO: 389 - DNA, 20 bp, Artificial Sequence
  Synthetic
acaggaaacatcattguugg

SEQ ID NO: 390 - DNA, 20 bp, Artificial Sequence
  Synthetic
cacaggaaacatcatuguug

SEQ ID NO: 391 - DNA, 20 bp, Artificial Sequence
  Synthetic
ucacaggaaacatcauuguu

SEQ ID NO: 392 - DNA, 20 bp, Artificial Sequence
  Synthetic
gucacaggaaacatcauugu

SEQ ID NO: 393 - DNA, 20 bp, Artificial Sequence
  Synthetic
ggucacaggaaacatcauug

SEQ ID NO: 394 - RNA, 20 nt, Artificial Sequence
  Synthetic
uggucacaggaaacaucauu

SEQ ID NO: 395 - RNA, 20 nt, Artificial Sequence
  Synthetic
guggucacaggaaacaucau

SEQ ID NO: 396 - DNA, 20 bp, Artificial Sequence
  Synthetic
gguggtcacaggaaacauca

SEQ ID NO: 397 - DNA, 20 bp, Artificial Sequence
  Synthetic
ggguggtcacaggaaacauc

SEQ ID NO: 398 - DNA, 20 bp, Artificial Sequence
  Synthetic
gggguggtcacaggaaacau

SEQ ID NO: 399 - DNA, 20 bp, Artificial Sequence
  Synthetic
aggggtggtcacaggaaaca

SEQ ID NO: 400 - DNA, 20 bp, Artificial Sequence
  Synthetic
gaggggtggtcacaggaaac

SEQ ID NO: 401 - DNA, 20 bp, Artificial Sequence
  Synthetic
agaggggtggtcacaggaaa

SEQ ID NO: 402 - DNA, 20 bp, Artificial Sequence
  Synthetic
uagaggggtggtcacaggaa

SEQ ID NO: 403 - DNA, 20 bp, Artificial Sequence
  Synthetic
uuagaggggtggtcacagga

SEQ ID NO: 404 - DNA, 20 bp, Artificial Sequence
  Synthetic
guuagaggggtggtcacagg

SEQ ID NO: 405 - DNA, 20 bp, Artificial Sequence
  Synthetic
uguuagaggggtggtcacag

SEQ ID NO: 406 - DNA, 20 bp, Artificial Sequence
  Synthetic
guguuagaggggtggucaca

SEQ ID NO: 407 - DNA, 20 bp, Artificial Sequence
  Synthetic
ggugutagaggggtggucac

SEQ ID NO: 408 - DNA, 20 bp, Artificial Sequence
  Synthetic
cggugttagaggggtgguca

SEQ ID NO: 409 - DNA, 20 bp, Artificial Sequence
  Synthetic
acggugttagaggggugguc

SEQ ID NO: 410 - DNA, 20 bp, Artificial Sequence
  Synthetic
cacggtgttagagggguggu

SEQ ID NO: 411 - DNA, 20 bp, Artificial Sequence
  Synthetic
gcacggtgttagaggggugg

SEQ ID NO: 412 - DNA, 20 bp, Artificial Sequence
  Synthetic
ggcacggtgttagaggggug

SEQ ID NO: 413 - DNA, 20 bp, Artificial Sequence
  Synthetic
gggcacggtgttagaggggu

SEQ ID NO: 414 - DNA, 20 bp, Artificial Sequence
  Synthetic
agggcacggtgttagagggg

SEQ ID NO: 415 - DNA, 20 bp, Artificial Sequence
  Synthetic
gagggcacggtgttagaggg

SEQ ID NO: 416 - DNA, 20 bp, Artificial Sequence
  Synthetic
agagggcacggtgttagagg

SEQ ID NO: 417 - DNA, 20 bp, Artificial Sequence
  Synthetic
cagagggcacggtgtuagag

SEQ ID NO: 418 - DNA, 20 bp, Artificial Sequence
  Synthetic
ccagagggcacggtguuaga

SEQ ID NO: 419 - DNA, 20 bp, Artificial Sequence
  Synthetic
cccagagggcacggtguuag

SEQ ID NO: 420 - RNA, 20 nt, Artificial Sequence
  Synthetic
ucccagagggcacgguguua

SEQ ID NO: 421 - RNA, 20 nt, Artificial Sequence
  Synthetic
cucccagagggcacgguguu

SEQ ID NO: 422 - RNA, 20 nt, Artificial Sequence
  Synthetic
gcucccagagggcacggugu

SEQ ID NO: 423 - RNA, 20 nt, Artificial Sequence
  Synthetic
ugcucccagagggcacggug

SEQ ID NO: 424 - RNA, 20 nt, Artificial Sequence
  Synthetic
uugcucccagagggcacggu

SEQ ID NO: 425 - DNA, 20 bp, Artificial Sequence
  Synthetic
guugctcccagagggcacgg

SEQ ID NO: 426 - DNA, 20 bp, Artificial Sequence
  Synthetic
gguugctcccagagggcacg

SEQ ID NO: 427 - DNA, 20 bp, Artificial Sequence
  Synthetic
ugguugctcccagagggcac

SEQ ID NO: 428 - DNA, 20 bp, Artificial Sequence
  Synthetic
cuggutgctcccagagggca

SEQ ID NO: 429 - DNA, 20 bp, Artificial Sequence
  Synthetic
ccuggttgctcccagagggc

SEQ ID NO: 430 - DNA, 20 bp, Artificial Sequence
  Synthetic
uccuggttgctcccagaggg

SEQ ID NO: 431 - DNA, 20 bp, Artificial Sequence
  Synthetic
guccuggttgctcccagagg

SEQ ID NO: 432 - DNA, 20 bp, Artificial Sequence
  Synthetic
ggucctggttgctcccagag

SEQ ID NO: 433 - DNA, 20 bp, Artificial Sequence
  Synthetic
aggucctggttgctcccaga

SEQ ID NO: 434 - DNA, 20 bp, Artificial Sequence
  Synthetic
caggucctggttgctcccag

SEQ ID NO: 435 - DNA, 20 bp, Artificial Sequence
  Synthetic
ccaggtcctggttgcuccca

SEQ ID NO: 436 - DNA, 20 bp, Artificial Sequence
  Synthetic
cccaggtcctggttgcuccc

SEQ ID NO: 437 - DNA, 20 bp, Artificial Sequence
  Synthetic
ucccaggtcctggttgcucc

SEQ ID NO: 438 - DNA, 20 bp, Artificial Sequence
  Synthetic
cucccaggtcctggtugcuc

SEQ ID NO: 439 - DNA, 20 bp, Artificial Sequence
  Synthetic
gcucccaggtcctgguugcu

SEQ ID NO: 440 - DNA, 20 bp, Artificial Sequence
  Synthetic
agcucccaggtcctgguugc

SEQ ID NO: 441 - DNA, 20 bp, Artificial Sequence
  Synthetic
cagcucccaggtcctgguug

SEQ ID NO: 442 - DNA, 20 bp, Artificial Sequence
  Synthetic
ccagctcccaggtccugguu

SEQ ID NO: 443 - DNA, 20 bp, Artificial Sequence
  Synthetic
cccagctcccaggtccuggu

SEQ ID NO: 444 - DNA, 20 bp, Artificial Sequence
  Synthetic
ccccagctcccaggtccugg

SEQ ID NO: 445 - DNA, 20 bp, Artificial Sequence
  Synthetic
gccccagctcccagguccug

SEQ ID NO: 446 - DNA, 20 bp, Artificial Sequence
  Synthetic
ggccccagctcccagguccu

SEQ ID NO: 447 - DNA, 20 bp, Artificial Sequence
  Synthetic
cggccccagctcccaggucc

SEQ ID NO: 448 - DNA, 20 bp, Artificial Sequence
  Synthetic
ccggccccagctcccagguc

SEQ ID NO: 449 - DNA, 20 bp, Artificial Sequence
  Synthetic
cccggccccagctcccaggu

SEQ ID NO: 450 - DNA, 20 bp, Artificial Sequence
  Synthetic
ccccggccccagctcccagg

SEQ ID NO: 451 - DNA, 20 bp, Artificial Sequence
  Synthetic
uccccggccccagctcccag

SEQ ID NO: 452 - RNA, 20 nt, Artificial Sequence
  Synthetic
uuccccggccccagcuccca

SEQ ID NO: 453 - RNA, 20 nt, Artificial Sequence
  Synthetic
cuuccccggccccagcuccc

SEQ ID NO: 454 - RNA, 20 nt, Artificial Sequence
  Synthetic
ucuuccccggccccagcucc

SEQ ID NO: 455 - RNA, 20 nt, Artificial Sequence
  Synthetic
gucuuccccggccccagcuc

SEQ ID NO: 456 - DNA, 20 bp, Artificial Sequence
  Synthetic
cgucutccccggccccagcu

SEQ ID NO: 457 - DNA, 20 bp, Artificial Sequence
  Synthetic
gcgucttccccggccccagc

SEQ ID NO: 458 - DNA, 20 bp, Artificial Sequence
  Synthetic
ggcgucttccccggccccag

SEQ ID NO: 459 - DNA, 20 bp, Artificial Sequence
  Synthetic
gggcgtcttccccggcccca

SEQ ID NO: 460 - DNA, 20 bp, Artificial Sequence
  Synthetic
cgggcgtcttccccggcccc

SEQ ID NO: 461 - DNA, 20 bp, Artificial Sequence
  Synthetic
ccgggcgtcttccccggccc

SEQ ID NO: 462 - DNA, 20 bp, Artificial Sequence
  Synthetic
accgggcgtcttccccggcc

SEQ ID NO: 463 - DNA, 20 bp, Artificial Sequence
  Synthetic
gaccgggcgtcttccccggc

SEQ ID NO: 464 - DNA, 20 bp, Artificial Sequence
  Synthetic
cgaccgggcgtcttccccgg

SEQ ID NO: 465 - DNA, 20 bp, Artificial Sequence
  Synthetic
ccgaccgggcgtcttccccg

SEQ ID NO: 466 - DNA, 20 bp, Artificial Sequence
  Synthetic
uccgaccgggcgtctucccc

SEQ ID NO: 467 - DNA, 20 bp, Artificial Sequence
  Synthetic
auccgaccgggcgtcuuccc

SEQ ID NO: 468 - DNA, 20 bp, Artificial Sequence
  Synthetic
cauccgaccgggcgtcuucc

SEQ ID NO: 469 - RNA, 20 nt, Artificial Sequence
  Synthetic
ucauccgaccgggcgucuuc

SEQ ID NO: 470 - RNA, 20 nt, Artificial Sequence
  Synthetic
gucauccgaccgggcgucuu

SEQ ID NO: 471 - DNA, 20 bp, Artificial Sequence
  Synthetic
ugucatccgaccgggcgucu

SEQ ID NO: 472 - DNA, 20 bp, Artificial Sequence
  Synthetic
cugucatccgaccgggcguc

SEQ ID NO: 473 - DNA, 20 bp, Artificial Sequence
  Synthetic
gcugucatccgaccgggcgu

SEQ ID NO: 474 - DNA, 20 bp, Artificial Sequence
  Synthetic
ugcugtcatccgaccgggcg

SEQ ID NO: 475 - DNA, 20 bp, Artificial Sequence
  Synthetic
cugcugtcatccgaccgggc

SEQ ID NO: 476 - DNA, 20 bp, Artificial Sequence
  Synthetic
gcugctgtcatccgaccggg

SEQ ID NO: 477 - DNA, 20 bp, Artificial Sequence
  Synthetic
ugcugctgtcatccgaccgg

SEQ ID NO: 478 - DNA, 20 bp, Artificial Sequence
  Synthetic
cugcugctgtcatccgaccg

SEQ ID NO: 479 - DNA, 20 bp, Artificial Sequence
  Synthetic
gcugctgctgtcatccgacc

SEQ ID NO: 480 - DNA, 20 bp, Artificial Sequence
  Synthetic
ggcugctgctgtcatccgac

SEQ ID NO: 481 - DNA, 20 bp, Artificial Sequence
  Synthetic
cggcugctgctgtcauccga

SEQ ID NO: 482 - DNA, 20 bp, Artificial Sequence
  Synthetic
gcggctgctgctgtcauccg

SEQ ID NO: 483 - DNA, 20 bp, Artificial Sequence
  Synthetic
ugcggctgctgctgtcaucc

SEQ ID NO: 484 - DNA, 20 bp, Artificial Sequence
  Synthetic
augcggctgctgctgucauc

SEQ ID NO: 485 - DNA, 20 bp, Artificial Sequence
  Synthetic
gaugcggctgctgctgucau

SEQ ID NO: 486 - DNA, 20 bp, Artificial Sequence
  Synthetic
ugaugcggctgctgcuguca

SEQ ID NO: 487 - DNA, 20 bp, Artificial Sequence
  Synthetic
augaugcggctgctgcuguc

SEQ ID NO: 488 - DNA, 20 bp, Artificial Sequence
  Synthetic
gaugatgcggctgctgcugu

SEQ ID NO: 489 - DNA, 20 bp, Artificial Sequence
  Synthetic
ugaugatgcggctgcugcug

SEQ ID NO: 490 - DNA, 20 bp, Artificial Sequence
  Synthetic
uugaugatgcggctgcugcu

SEQ ID NO: 491 - DNA, 20 bp, Artificial Sequence
  Synthetic
auugatgatgcggctgcugc

SEQ ID NO: 492 - DNA, 20 bp, Artificial Sequence
  Synthetic
cauugatgatgcggcugcug

SEQ ID NO: 493 - DNA, 20 bp, Artificial Sequence
  Synthetic
ccauugatgatgcggcugcu

SEQ ID NO: 494 - DNA, 20 bp, Artificial Sequence
  Synthetic
uccautgatgatgcggcugc

SEQ ID NO: 495 - DNA, 20 bp, Artificial Sequence
  Synthetic
auccattgatgatgcggcug

SEQ ID NO: 496 - DNA, 20 bp, Artificial Sequence
  Synthetic
gauccattgatgatgcggcu

SEQ ID NO: 497 - DNA, 20 bp, Artificial Sequence
  Synthetic
ggauccattgatgatgcggc

SEQ ID NO: 498 - DNA, 20 bp, Artificial Sequence
  Synthetic
cggauccattgatgaugcgg

SEQ ID NO: 499 - DNA, 20 bp, Artificial Sequence
  Synthetic
ucggatccattgatgaugcg

SEQ ID NO: 500 - DNA, 20 bp, Artificial Sequence
  Synthetic
gucggatccattgatgaugc

SEQ ID NO: 501 - DNA, 20 bp, Artificial Sequence
  Synthetic
agucggatccattgaugaug

SEQ ID NO: 502 - DNA, 20 bp, Artificial Sequence
  Synthetic
cagucggatccattgaugau

SEQ ID NO: 503 - DNA, 20 bp, Artificial Sequence
  Synthetic
gcagucggatccattgauga

SEQ ID NO: 504 - DNA, 20 bp, Artificial Sequence
  Synthetic
cgcagtcggatccatugaug

SEQ ID NO: 505 - DNA, 20 bp, Artificial Sequence
  Synthetic
ucgcagtcggatccauugau

SEQ ID NO: 506 - DNA, 20 bp, Artificial Sequence
  Synthetic
aucgcagtcggatccauuga

SEQ ID NO: 507 - DNA, 20 bp, Artificial Sequence
  Synthetic
uaucgcagtcggatccauug

SEQ ID NO: 508 - DNA, 20 bp, Artificial Sequence
  Synthetic
auaucgcagtcggatccauu

SEQ ID NO: 509 - DNA, 20 bp, Artificial Sequence
  Synthetic
cauaucgcagtcggauccau

SEQ ID NO: 510 - DNA, 20 bp, Artificial Sequence
  Synthetic
gcauatcgcagtcggaucca

SEQ ID NO: 511 - DNA, 20 bp, Artificial Sequence
  Synthetic
ugcauatcgcagtcggaucc

SEQ ID NO: 512 - DNA, 20 bp, Artificial Sequence
  Synthetic
gugcatatcgcagtcggauc

SEQ ID NO: 513 - DNA, 20 bp, Artificial Sequence
  Synthetic
ugugcatatcgcagtcggau

SEQ ID NO: 514 - DNA, 20 bp, Artificial Sequence
  Synthetic
gugugcatatcgcagucgga

SEQ ID NO: 515 - DNA, 20 bp, Artificial Sequence
  Synthetic
ggugugcatatcgcagucgg

SEQ ID NO: 516 - DNA, 20 bp, Artificial Sequence
  Synthetic
gggugtgcatatcgcagucg

SEQ ID NO: 517 - DNA, 20 bp, Artificial Sequence
  Synthetic
ugggugtgcatatcgcaguc

SEQ ID NO: 518 - DNA, 20 bp, Artificial Sequence
  Synthetic
cugggtgtgcatatcgcagu

SEQ ID NO: 519 - DNA, 20 bp, Artificial Sequence
  Synthetic
gcugggtgtgcatatcgcag

SEQ ID NO: 520 - DNA, 20 bp, Artificial Sequence
  Synthetic
ggcugggtgtgcataucgca

SEQ ID NO: 521 - DNA, 20 bp, Artificial Sequence
  Synthetic
cggcugggtgtgcataucgc

SEQ ID NO: 522 - DNA, 20 bp, Artificial Sequence
  Synthetic
acggctgggtgtgcauaucg

SEQ ID NO: 523 - DNA, 20 bp, Artificial Sequence
  Synthetic
cacggctgggtgtgcauauc

SEQ ID NO: 524 - DNA, 20 bp, Artificial Sequence
  Synthetic
ccacggctgggtgtgcauau

SEQ ID NO: 525 - DNA, 20 bp, Artificial Sequence
  Synthetic
gccacggctgggtgtgcaua

SEQ ID NO: 526 - DNA, 20 bp, Artificial Sequence
  Synthetic
ugccacggctgggtgugcau

SEQ ID NO: 527 - DNA, 20 bp, Artificial Sequence
  Synthetic
cugccacggctgggtgugca

SEQ ID NO: 528 - DNA, 20 bp, Artificial Sequence
  Synthetic
ccugccacggctgggugugc

SEQ ID NO: 529 - DNA, 20 bp, Artificial Sequence
  Synthetic
gccugccacggctgggugug

SEQ ID NO: 530 - DNA, 20 bp, Artificial Sequence
  Synthetic
ggccugccacggctgggugu

SEQ ID NO: 531 - DNA, 20 bp, Artificial Sequence
  Synthetic
cggcctgccacggctgggug

SEQ ID NO: 532 - DNA, 20 bp, Artificial Sequence
  Synthetic
gcggcctgccacggcugggu

SEQ ID NO: 533 - DNA, 20 bp, Artificial Sequence
  Synthetic
cgcggcctgccacggcuggg

SEQ ID NO: 534 - DNA, 20 bp, Artificial Sequence
  Synthetic
gcgcggcctgccacggcugg

SEQ ID NO: 535 - DNA, 20 bp, Artificial Sequence
  Synthetic
agcgcggcctgccacggcug

SEQ ID NO: 536 - DNA, 20 bp, Artificial Sequence
  Synthetic
cagcgcggcctgccacggcu

SEQ ID NO: 537 - DNA, 20 bp, Artificial Sequence
  Synthetic
acagcgcggcctgccacggc

SEQ ID NO: 538 - DNA, 20 bp, Artificial Sequence
  Synthetic
aacagcgcggcctgccacgg

SEQ ID NO: 539 - DNA, 20 bp, Artificial Sequence
  Synthetic
caacagcgcggcctgccacg

SEQ ID NO: 540 - DNA, 20 bp, Artificial Sequence
  Synthetic
gcaacagcgcggcctgccac

SEQ ID NO: 541 - RNA, 20 nt, Artificial Sequence
  Synthetic
agcaacagcgcggccugcca

SEQ ID NO: 542 - RNA, 20 nt, Artificial Sequence
  Synthetic
uagcaacagcgcggccugcc

SEQ ID NO: 543 - RNA, 20 nt, Artificial Sequence
  Synthetic
uuagcaacagcgcggccugc

SEQ ID NO: 544 - RNA, 20 nt, Artificial Sequence
  Synthetic
cuuagcaacagcgcggccug

SEQ ID NO: 545 - RNA, 20 nt, Artificial Sequence
  Synthetic
ccuuagcaacagcgcggccu

SEQ ID NO: 546 - RNA, 20 nt, Artificial Sequence
  Synthetic
gccuuagcaacagcgcggcc

SEQ ID NO: 547 - DNA, 20 bp, Artificial Sequence
  Synthetic
ggccutagcaacagcgcggc

SEQ ID NO: 548 - DNA, 20 bp, Artificial Sequence
  Synthetic
gggccttagcaacagcgcgg

SEQ ID NO: 549 - DNA, 20 bp, Artificial Sequence
  Synthetic
ugggccttagcaacagcgcg

SEQ ID NO: 550 - DNA, 20 bp, Artificial Sequence
  Synthetic
uugggccttagcaacagcgc

SEQ ID NO: 551 - DNA, 20 bp, Artificial Sequence
  Synthetic
guugggccttagcaacagcg

SEQ ID NO: 552 - DNA, 20 bp, Artificial Sequence
  Synthetic
gguugggccttagcaacagc

SEQ ID NO: 553 - DNA, 20 bp, Artificial Sequence
  Synthetic
ugguugggccttagcaacag

SEQ ID NO: 554 - DNA, 20 bp, Artificial Sequence
  Synthetic
cuggutgggccttagcaaca

SEQ ID NO: 555 - DNA, 20 bp, Artificial Sequence
  Synthetic
gcuggttgggccttagcaac

SEQ ID NO: 556 - DNA, 20 bp, Artificial Sequence
  Synthetic
agcuggttgggccttagcaa

SEQ ID NO: 557 - DNA, 20 bp, Artificial Sequence
  Synthetic
gagcuggttgggcctuagca

SEQ ID NO: 558 - DNA, 20 bp, Artificial Sequence
  Synthetic
agagctggttgggccuuagc

SEQ ID NO: 559 - DNA, 20 bp, Artificial Sequence
  Synthetic
uagagctggttgggccuuag

SEQ ID NO: 560 - DNA, 20 bp, Artificial Sequence
  Synthetic
guagagctggttgggccuua

SEQ ID NO: 561 - DNA, 20 bp, Artificial Sequence
  Synthetic
aguagagctggttgggccuu

SEQ ID NO: 562 - DNA, 20 bp, Artificial Sequence
  Synthetic
caguagagctggttgggccu

SEQ ID NO: 563 - DNA, 20 bp, Artificial Sequence
  Synthetic
gcaguagagctggttgggcc

SEQ ID NO: 564 - DNA, 20 bp, Artificial Sequence
  Synthetic
cgcagtagagctggtugggc

SEQ ID NO: 565 - DNA, 20 bp, Artificial Sequence
  Synthetic
ccgcagtagagctgguuggg

SEQ ID NO: 566 - DNA, 20 bp, Artificial Sequence
  Synthetic
cccgcagtagagctgguugg

SEQ ID NO: 567 - DNA, 20 bp, Artificial Sequence
  Synthetic
ccccgcagtagagctgguug

SEQ ID NO: 568 - DNA, 20 bp, Artificial Sequence
  Synthetic
gccccgcagtagagcugguu

SEQ ID NO: 569 - DNA, 20 bp, Artificial Sequence
  Synthetic
cgccccgcagtagagcuggu

SEQ ID NO: 570 - DNA, 20 bp, Artificial Sequence
  Synthetic
ccgccccgcagtagagcugg

SEQ ID NO: 571 - DNA, 20 bp, Artificial Sequence
  Synthetic
accgccccgcagtagagcug

SEQ ID NO: 572 - DNA, 20 bp, Artificial Sequence
  Synthetic
caccgccccgcagtagagcu

SEQ ID NO: 573 - DNA, 20 bp, Artificial Sequence
  Synthetic
acaccgccccgcagtagagc

SEQ ID NO: 574 - RNA, 20 nt, Artificial Sequence
  Synthetic
aacaccgccccgcaguagag

SEQ ID NO: 575 - RNA, 20 nt, Artificial Sequence
  Synthetic
caacaccgccccgcaguaga

SEQ ID NO: 576 - RNA, 20 nt, Artificial Sequence
  Synthetic
ccaacaccgccccgcaguag

SEQ ID NO: 577 - RNA, 20 nt, Artificial Sequence
  Synthetic
accaacaccgccccgcagua

SEQ ID NO: 578 - RNA, 20 nt, Artificial Sequence
  Synthetic
caccaacaccgccccgcagu

SEQ ID NO: 579 - DNA, 20 bp, Artificial Sequence
  Synthetic
gcaccaacaccgccccgcag

SEQ ID NO: 580 - RNA, 20 nt, Artificial Sequence
  Synthetic
ugcaccaacaccgccccgca

SEQ ID NO: 581 - RNA, 20 nt, Artificial Sequence
  Synthetic
augcaccaacaccgccccgc

SEQ ID NO: 582 - RNA, 20 nt, Artificial Sequence
  Synthetic
gaugcaccaacaccgccccg

SEQ ID NO: 583 - RNA, 20 nt, Artificial Sequence
  Synthetic
ggaugcaccaacaccgcccc

SEQ ID NO: 584 - RNA, 20 nt, Artificial Sequence
  Synthetic
uggaugcaccaacaccgccc

SEQ ID NO: 585 - DNA, 20 bp, Artificial Sequence
  Synthetic
guggatgcaccaacaccgcc

SEQ ID NO: 586 - DNA, 20 bp, Artificial Sequence
  Synthetic
uguggatgcaccaacaccgc

SEQ ID NO: 587 - DNA, 20 bp, Artificial Sequence
  Synthetic
cuguggatgcaccaacaccg

SEQ ID NO: 588 - DNA, 20 bp, Artificial Sequence
  Synthetic
acuguggatgcaccaacacc

SEQ ID NO: 589 - DNA, 20 bp, Artificial Sequence
  Synthetic
cacugtggatgcaccaacac

SEQ ID NO: 590 - DNA, 20 bp, Artificial Sequence
  Synthetic
ccacugtggatgcaccaaca

SEQ ID NO: 591 - DNA, 20 bp, Artificial Sequence
  Synthetic
gccactgtggatgcaccaac

SEQ ID NO: 592 - DNA, 20 bp, Artificial Sequence
  Synthetic
agccactgtggatgcaccaa

SEQ ID NO: 593 - DNA, 20 bp, Artificial Sequence
  Synthetic
cagccactgtggatgcacca

SEQ ID NO: 594 - DNA, 20 bp, Artificial Sequence
  Synthetic
gcagccactgtggatgcacc

SEQ ID NO: 595 - DNA, 20 bp, Artificial Sequence
  Synthetic
agcagccactgtggaugcac

SEQ ID NO: 596 - DNA, 20 bp, Artificial Sequence
  Synthetic
gagcagccactgtggaugca

SEQ ID NO: 597 - DNA, 20 bp, Artificial Sequence
  Synthetic
ugagcagccactgtggaugc

SEQ ID NO: 598 - DNA, 20 bp, Artificial Sequence
  Synthetic
gugagcagccactgtggaug

SEQ ID NO: 599 - DNA, 20 bp, Artificial Sequence
  Synthetic
cgugagcagccactguggau

SEQ ID NO: 600 - DNA, 20 bp, Artificial Sequence
  Synthetic
ccgugagcagccactgugga

SEQ ID NO: 601 - RNA, 20 nt, Artificial Sequence
  Synthetic
gccgugagcagccacugugg

SEQ ID NO: 602 - DNA, 20 bp, Artificial Sequence
  Synthetic
ggccgtgagcagccacugug

SEQ ID NO: 603 - DNA, 20 bp, Artificial Sequence
  Synthetic
cggccgtgagcagccacugu

SEQ ID NO: 604 - DNA, 20 bp, Artificial Sequence
  Synthetic
gcggccgtgagcagccacug

SEQ ID NO: 605 - DNA, 20 bp, Artificial Sequence
  Synthetic
ggcggccgtgagcagccacu

SEQ ID NO: 606 - DNA, 20 bp, Artificial Sequence
  Synthetic
gggcggccgtgagcagccac

SEQ ID NO: 607 - DNA, 20 bp, Artificial Sequence
  Synthetic
ugggcggccgtgagcagcca

SEQ ID NO: 608 - DNA, 20 bp, Artificial Sequence
  Synthetic
gugggcggccgtgagcagcc

SEQ ID NO: 609 - DNA, 20 bp, Artificial Sequence
  Synthetic
agugggcggccgtgagcagc

SEQ ID NO: 610 - DNA, 20 bp, Artificial Sequence
  Synthetic
cagugggcggccgtgagcag

SEQ ID NO: 611 - DNA, 20 bp, Artificial Sequence
  Synthetic
gcagugggcggccgtgagca

SEQ ID NO: 612 - DNA, 20 bp, Artificial Sequence
  Synthetic
ugcagtgggcggccgugagc

SEQ ID NO: 613 - DNA, 20 bp, Artificial Sequence
  Synthetic
cugcagtgggcggccgugag

SEQ ID NO: 614 - DNA, 20 bp, Artificial Sequence
  Synthetic
ccugcagtgggcggccguga

SEQ ID NO: 615 - DNA, 20 bp, Artificial Sequence
  Synthetic
uccugcagtgggcggccgug

SEQ ID NO: 616 - DNA, 20 bp, Artificial Sequence
  Synthetic
uuccugcagtgggcggccgu

SEQ ID NO: 617 - DNA, 20 bp, Artificial Sequence
  Synthetic
cuucctgcagtgggcggccg

SEQ ID NO: 618 - DNA, 20 bp, Artificial Sequence
  Synthetic
ucuucctgcagtgggcggcc

SEQ ID NO: 619 - DNA, 20 bp, Artificial Sequence
  Synthetic
uucuucctgcagtgggcggc

SEQ ID NO: 620 - DNA, 20 bp, Artificial Sequence
  Synthetic
uuucutcctgcagtgggcgg

SEQ ID NO: 621 - DNA, 20 bp, Artificial Sequence
  Synthetic
cuuucttcctgcagtgggcg

SEQ ID NO: 622 - DNA, 20 bp, Artificial Sequence
  Synthetic
acuuucttcctgcagugggc

SEQ ID NO: 623 - DNA, 20 bp, Artificial Sequence
  Synthetic
aacuutcttcctgcaguggg

SEQ ID NO: 624 - DNA, 20 bp, Artificial Sequence
  Synthetic
aaacuttcttcctgcagugg

SEQ ID NO: 625 - DNA, 20 bp, Artificial Sequence
  Synthetic
aaaactttcttcctgcagug

SEQ ID NO: 626 - DNA, 20 bp, Artificial Sequence
  Synthetic
gaaaactttcttcctgcagu

SEQ ID NO: 627 - DNA, 20 bp, Artificial Sequence
  Synthetic
ugaaaactttcttccugcag

SEQ ID NO: 628 - DNA, 20 bp, Artificial Sequence
  Synthetic
cugaaaactttcttccugca

SEQ ID NO: 629 - DNA, 20 bp, Artificial Sequence
  Synthetic
ucugaaaactttcttccugc

SEQ ID NO: 630 - DNA, 20 bp, Artificial Sequence
  Synthetic
cucugaaaactttctuccug

SEQ ID NO: 631 - DNA, 20 bp, Artificial Sequence
  Synthetic
acucugaaaactttcuuccu

SEQ ID NO: 632 - DNA, 20 bp, Artificial Sequence
  Synthetic
gacuctgaaaactttcuucc

SEQ ID NO: 633 - DNA, 20 bp, Artificial Sequence
  Synthetic
ggacuctgaaaacttucuuc

SEQ ID NO: 634 - DNA, 20 bp, Artificial Sequence
  Synthetic
cggactctgaaaactuucuu

SEQ ID NO: 635 - DNA, 20 bp, Artificial Sequence
  Synthetic
acggactctgaaaacuuucu

SEQ ID NO: 636 - DNA, 20 bp, Artificial Sequence
  Synthetic
gacggactctgaaaacuuuc

SEQ ID NO: 637 - DNA, 20 bp, Artificial Sequence
  Synthetic
agacggactctgaaaacuuu

SEQ ID NO: 638 - DNA, 20 bp, Artificial Sequence
  Synthetic
gagacggactctgaaaacuu

SEQ ID NO: 639 - DNA, 20 bp, Artificial Sequence
  Synthetic
cgagacggactctgaaaacu

SEQ ID NO: 640 - DNA, 20 bp, Artificial Sequence
  Synthetic
ccgagacggactctgaaaac

SEQ ID NO: 641 - DNA, 20 bp, Artificial Sequence
  Synthetic
gccgagacggactctgaaaa

SEQ ID NO: 642 - DNA, 20 bp, Artificial Sequence
  Synthetic
ggccgagacggactcugaaa

SEQ ID NO: 643 - DNA, 20 bp, Artificial Sequence
  Synthetic
uggccgagacggactcugaa

SEQ ID NO: 644 - RNA, 20 nt, Artificial Sequence
  Synthetic
guggccgagacggacucuga

SEQ ID NO: 645 - RNA, 20 nt, Artificial Sequence
  Synthetic
aguggccgagacggacucug

SEQ ID NO: 646 - RNA, 20 nt, Artificial Sequence
  Synthetic
uaguggccgagacggacucu

SEQ ID NO: 647 - RNA, 20 nt, Artificial Sequence
  Synthetic
guaguggccgagacggacuc

SEQ ID NO: 648 - DNA, 20 bp, Artificial Sequence
  Synthetic
aguagtggccgagacggacu

SEQ ID NO: 649 - DNA, 20 bp, Artificial Sequence
  Synthetic
gaguagtggccgagacggac

SEQ ID NO: 650 - DNA, 20 bp, Artificial Sequence
  Synthetic
ggaguagtggccgagacgga

SEQ ID NO: 651 - DNA, 20 bp, Artificial Sequence
  Synthetic
gggagtagtggccgagacgg

SEQ ID NO: 652 - DNA, 20 bp, Artificial Sequence
  Synthetic
agggagtagtggccgagacg

SEQ ID NO: 653 - DNA, 20 bp, Artificial Sequence
  Synthetic
cagggagtagtggccgagac

SEQ ID NO: 654 - DNA, 20 bp, Artificial Sequence
  Synthetic
acagggagtagtggccgaga

SEQ ID NO: 655 - DNA, 20 bp, Artificial Sequence
  Synthetic
gacagggagtagtggccgag

SEQ ID NO: 656 - DNA, 20 bp, Artificial Sequence
  Synthetic
ugacagggagtagtggccga

SEQ ID NO: 657 - DNA, 20 bp, Artificial Sequence
  Synthetic
gugacagggagtagtggccg

SEQ ID NO: 658 - DNA, 20 bp, Artificial Sequence
  Synthetic
ggugacagggagtaguggcc

SEQ ID NO: 659 - DNA, 20 bp, Artificial Sequence
  Synthetic
uggugacagggagtaguggc

SEQ ID NO: 660 - DNA, 20 bp, Artificial Sequence
  Synthetic
cuggugacagggagtagugg

SEQ ID NO: 661 - DNA, 20 bp, Artificial Sequence
  Synthetic
acuggtgacagggaguagug

SEQ ID NO: 662 - DNA, 20 bp, Artificial Sequence
  Synthetic
aacuggtgacagggaguagu

SEQ ID NO: 663 - DNA, 20 bp, Artificial Sequence
  Synthetic
aaacuggtgacagggaguag

SEQ ID NO: 664 - DNA, 20 bp, Artificial Sequence
  Synthetic
uaaactggtgacagggagua

SEQ ID NO: 665 - DNA, 20 bp, Artificial Sequence
  Synthetic
auaaactggtgacagggagu

SEQ ID NO: 666 - DNA, 20 bp, Artificial Sequence
  Synthetic
cauaaactggtgacagggag

SEQ ID NO: 667 - DNA, 20 bp, Artificial Sequence
  Synthetic
ucauaaactggtgacaggga

SEQ ID NO: 668 - DNA, 20 bp, Artificial Sequence
  Synthetic
uucauaaactggtgacaggg

SEQ ID NO: 669 - DNA, 20 bp, Artificial Sequence
  Synthetic
auucataaactggtgacagg

SEQ ID NO: 670 - DNA, 20 bp, Artificial Sequence
  Synthetic
gauucataaactggtgacag

SEQ ID NO: 671 - DNA, 20 bp, Artificial Sequence
  Synthetic
agauucataaactggugaca

SEQ ID NO: 672 - DNA, 20 bp, Artificial Sequence
  Synthetic
cagautcataaactggugac

SEQ ID NO: 673 - DNA, 20 bp, Artificial Sequence
  Synthetic
ccagattcataaactgguga

SEQ ID NO: 674 - DNA, 20 bp, Artificial Sequence
  Synthetic
cccagattcataaacuggug

SEQ ID NO: 675 - DNA, 20 bp, Artificial Sequence
  Synthetic
gcccagattcataaacuggu

SEQ ID NO: 676 - DNA, 20 bp, Artificial Sequence
  Synthetic
ugcccagattcataaacugg

SEQ ID NO: 677 - DNA, 20 bp, Artificial Sequence
  Synthetic
cugcccagattcataaacug

SEQ ID NO: 678 - DNA, 20 bp, Artificial Sequence
  Synthetic
gcugcccagattcataaacu

SEQ ID NO: 679 - DNA, 20 bp, Artificial Sequence
  Synthetic
ugcugcccagattcauaaac

SEQ ID NO: 680 - DNA, 20 bp, Artificial Sequence
  Synthetic
cugcugcccagattcauaaa

SEQ ID NO: 681 - DNA, 20 bp, Artificial Sequence
  Synthetic
ucugctgcccagattcauaa

SEQ ID NO: 682 - DNA, 20 bp, Artificial Sequence
  Synthetic
aucugctgcccagatucaua

SEQ ID NO: 683 - DNA, 20 bp, Artificial Sequence
  Synthetic
caucugctgcccagauucau

SEQ ID NO: 684 - DNA, 20 bp, Artificial Sequence
  Synthetic
acauctgctgcccagauuca

SEQ ID NO: 685 - DNA, 20 bp, Artificial Sequence
  Synthetic
aacauctgctgcccagauuc

SEQ ID NO: 686 - DNA, 20 bp, Artificial Sequence
  Synthetic
gaacatctgctgcccagauu

SEQ ID NO: 687 - DNA, 20 bp, Artificial Sequence
  Synthetic
ggaacatctgctgcccagau

SEQ ID NO: 688 - DNA, 20 bp, Artificial Sequence
  Synthetic
uggaacatctgctgcccaga

SEQ ID NO: 689 - DNA, 20 bp, Artificial Sequence
  Synthetic
cuggaacatctgctgcccag

SEQ ID NO: 690 - DNA, 20 bp, Artificial Sequence
  Synthetic
ccuggaacatctgctgccca

SEQ ID NO: 691 - DNA, 20 bp, Artificial Sequence
  Synthetic
cccuggaacatctgcugccc

SEQ ID NO: 692 - DNA, 20 bp, Artificial Sequence
  Synthetic
ccccuggaacatctgcugcc

SEQ ID NO: 693 - DNA, 20 bp, Artificial Sequence
  Synthetic
ccccctggaacatctgcugc

SEQ ID NO: 694 - DNA, 20 bp, Artificial Sequence
  Synthetic
accccctggaacatcugcug

SEQ ID NO: 695 - DNA, 20 bp, Artificial Sequence
  Synthetic
gaccccctggaacatcugcu

SEQ ID NO: 696 - DNA, 20 bp, Artificial Sequence
  Synthetic
ugaccccctggaacaucugc

SEQ ID NO: 697 - DNA, 20 bp, Artificial Sequence
  Synthetic
uugaccccctggaacaucug

SEQ ID NO: 698 - DNA, 20 bp, Artificial Sequence
  Synthetic
uuugaccccctggaacaucu

SEQ ID NO: 699 - DNA, 20 bp, Artificial Sequence
  Synthetic
auuugaccccctggaacauc

SEQ ID NO: 700 - DNA, 20 bp, Artificial Sequence
  Synthetic
gauuugaccccctggaacau

SEQ ID NO: 701 - DNA, 20 bp, Artificial Sequence
  Synthetic
ggauutgaccccctggaaca

SEQ ID NO: 702 - DNA, 20 bp, Artificial Sequence
  Synthetic
uggauttgaccccctggaac

SEQ ID NO: 703 - DNA, 20 bp, Artificial Sequence
  Synthetic
auggatttgacccccuggaa

SEQ ID NO: 704 - DNA, 20 bp, Artificial Sequence
  Synthetic
gauggatttgacccccugga

SEQ ID NO: 705 - DNA, 20 bp, Artificial Sequence
  Synthetic
ggauggatttgacccccugg

SEQ ID NO: 706 - DNA, 20 bp, Artificial Sequence
  Synthetic
gggauggatttgacccccug

SEQ ID NO: 707 - DNA, 20 bp, Artificial Sequence
  Synthetic
ggggatggatttgacccccu

SEQ ID NO: 708 - DNA, 20 bp, Artificial Sequence
  Synthetic
gggggatggatttgaccccc

SEQ ID NO: 709 - DNA, 20 bp, Artificial Sequence
  Synthetic
ugggggatggatttgacccc

SEQ ID NO: 710 - DNA, 20 bp, Artificial Sequence
  Synthetic
gugggggatggatttgaccc

SEQ ID NO: 711 - DNA, 20 bp, Artificial Sequence
  Synthetic
ggugggggatggattugacc

SEQ ID NO: 712 - DNA, 20 bp, Artificial Sequence
  Synthetic
gggugggggatggatuugac

SEQ ID NO: 713 - DNA, 20 bp, Artificial Sequence
  Synthetic
agggugggggatggauuuga

SEQ ID NO: 714 - DNA, 20 bp, Artificial Sequence
  Synthetic
cagggtgggggatggauuug

SEQ ID NO: 715 - DNA, 20 bp, Artificial Sequence
  Synthetic
ccagggtgggggatggauuu

SEQ ID NO: 716 - DNA, 20 bp, Artificial Sequence
  Synthetic
gccagggtgggggatggauu

SEQ ID NO: 717 - DNA, 20 bp, Artificial Sequence
  Synthetic
agccagggtgggggauggau

SEQ ID NO: 718 - DNA, 20 bp, Artificial Sequence
  Synthetic
uagccagggtgggggaugga

SEQ ID NO: 719 - DNA, 20 bp, Artificial Sequence
  Synthetic
guagccagggtgggggaugg

SEQ ID NO: 720 - DNA, 20 bp, Artificial Sequence
  Synthetic
aguagccagggtgggggaug

SEQ ID NO: 721 - DNA, 20 bp, Artificial Sequence
  Synthetic
gaguagccagggtgggggau

SEQ ID NO: 722 - DNA, 20 bp, Artificial Sequence
  Synthetic
ggaguagccagggtggggga

SEQ ID NO: 723 - DNA, 20 bp, Artificial Sequence
  Synthetic
gggagtagccagggtggggg

SEQ ID NO: 724 - DNA, 20 bp, Artificial Sequence
  Synthetic
ugggagtagccagggugggg

SEQ ID NO: 725 - DNA, 20 bp, Artificial Sequence
  Synthetic
gugggagtagccaggguggg

SEQ ID NO: 726 - DNA, 20 bp, Artificial Sequence
  Synthetic
ggugggagtagccagggugg

SEQ ID NO: 727 - DNA, 20 bp, Artificial Sequence
  Synthetic
gggugggagtagccagggug

SEQ ID NO: 728 - DNA, 20 bp, Artificial Sequence
  Synthetic
agggugggagtagccagggu

SEQ ID NO: 729 - DNA, 20 bp, Artificial Sequence
  Synthetic
cagggtgggagtagccaggg

SEQ ID NO: 730 - DNA, 20 bp, Artificial Sequence
  Synthetic
ccagggtgggagtagccagg

SEQ ID NO: 731 - DNA, 20 bp, Artificial Sequence
  Synthetic
gccagggtgggagtagccag

SEQ ID NO: 732 - DNA, 20 bp, Artificial Sequence
  Synthetic
ggccagggtgggagtagcca

SEQ ID NO: 733 - DNA, 20 bp, Artificial Sequence
  Synthetic
uggccagggtgggaguagcc

SEQ ID NO: 734 - DNA, 20 bp, Artificial Sequence
  Synthetic
guggccagggtgggaguagc

SEQ ID NO: 735 - DNA, 20 bp, Artificial Sequence
  Synthetic
aguggccagggtgggaguag

SEQ ID NO: 736 - DNA, 20 bp, Artificial Sequence
  Synthetic
gaguggccagggtgggagua

SEQ ID NO: 737 - DNA, 20 bp, Artificial Sequence
  Synthetic
agaguggccagggtgggagu

SEQ ID NO: 738 - DNA, 20 bp, Artificial Sequence
  Synthetic
uagagtggccagggtgggag

SEQ ID NO: 739 - DNA, 20 bp, Artificial Sequence
  Synthetic
uuagagtggccaggguggga

SEQ ID NO: 740 - DNA, 20 bp, Artificial Sequence
  Synthetic
guuagagtggccaggguggg

SEQ ID NO: 741 - DNA, 20 bp, Artificial Sequence
  Synthetic
cguuagagtggccagggugg

SEQ ID NO: 742 - DNA, 20 bp, Artificial Sequence
  Synthetic
ucguuagagtggccagggug

SEQ ID NO: 743 - DNA, 20 bp, Artificial Sequence
  Synthetic
gucgutagagtggccagggu

SEQ ID NO: 744 - DNA, 20 bp, Artificial Sequence
  Synthetic
ggucgttagagtggccaggg

SEQ ID NO: 745 - DNA, 20 bp, Artificial Sequence
  Synthetic
aggucgttagagtggccagg

SEQ ID NO: 746 - DNA, 20 bp, Artificial Sequence
  Synthetic
gaggucgttagagtggccag

SEQ ID NO: 747 - DNA, 20 bp, Artificial Sequence
  Synthetic
ugaggtcgttagagtggcca

SEQ ID NO: 748 - DNA, 20 bp, Artificial Sequence
  Synthetic
augaggtcgttagaguggcc

SEQ ID NO: 749 - DNA, 20 bp, Artificial Sequence
  Synthetic
caugaggtcgttagaguggc

SEQ ID NO: 750 - DNA, 20 bp, Artificial Sequence
  Synthetic
gcaugaggtcgttagagugg

SEQ ID NO: 751 - DNA, 20 bp, Artificial Sequence
  Synthetic
agcaugaggtcgttagagug

SEQ ID NO: 752 - DNA, 20 bp, Artificial Sequence
  Synthetic
gagcatgaggtcgttagagu

SEQ ID NO: 753 - DNA, 20 bp, Artificial Sequence
  Synthetic
ugagcatgaggtcgtuagag

SEQ ID NO: 754 - DNA, 20 bp, Artificial Sequence
  Synthetic
augagcatgaggtcguuaga

SEQ ID NO: 755 - DNA, 20 bp, Artificial Sequence
  Synthetic
gaugagcatgaggtcguuag

SEQ ID NO: 756 - DNA, 20 bp, Artificial Sequence
  Synthetic
ugaugagcatgaggtcguua

SEQ ID NO: 757 - DNA, 20 bp, Artificial Sequence
  Synthetic
uugaugagcatgaggucguu

SEQ ID NO: 758 - DNA, 20 bp, Artificial Sequence
  Synthetic
uuugatgagcatgaggucgu

SEQ ID NO: 759 - DNA, 20 bp, Artificial Sequence
  Synthetic
guuugatgagcatgaggucg

SEQ ID NO: 760 - DNA, 20 bp, Artificial Sequence
  Synthetic
aguuugatgagcatgagguc

SEQ ID NO: 761 - DNA, 20 bp, Artificial Sequence
  Synthetic
caguutgatgagcatgaggu

SEQ ID NO: 762 - DNA, 20 bp, Artificial Sequence
  Synthetic
ucaguttgatgagcaugagg

SEQ ID NO: 763 - DNA, 20 bp, Artificial Sequence
  Synthetic
uucagtttgatgagcaugag

SEQ ID NO: 764 - DNA, 20 bp, Artificial Sequence
  Synthetic
guucagtttgatgagcauga

SEQ ID NO: 765 - DNA, 20 bp, Artificial Sequence
  Synthetic
uguucagtttgatgagcaug

SEQ ID NO: 766 - DNA, 20 bp, Artificial Sequence
  Synthetic
cuguucagtttgatgagcau

SEQ ID NO: 767 - DNA, 20 bp, Artificial Sequence
  Synthetic
ucugutcagtttgatgagca

SEQ ID NO: 768 - DNA, 20 bp, Artificial Sequence
  Synthetic
uucugttcagtttgaugagc

SEQ ID NO: 769 - DNA, 20 bp, Artificial Sequence
  Synthetic
cuucugttcagtttgaugag

SEQ ID NO: 770 - DNA, 20 bp, Artificial Sequence
  Synthetic
ucuuctgttcagtttgauga

SEQ ID NO: 771 - DNA, 20 bp, Artificial Sequence
  Synthetic
uucuuctgttcagttugaug

SEQ ID NO: 772 - DNA, 20 bp, Artificial Sequence
  Synthetic
auucutctgttcagtuugau

SEQ ID NO: 773 - DNA, 20 bp, Artificial Sequence
  Synthetic
aauucttctgttcaguuuga

SEQ ID NO: 774 - DNA, 20 bp, Artificial Sequence
  Synthetic
gaauucttctgttcaguuug

SEQ ID NO: 775 - DNA, 20 bp, Artificial Sequence
  Synthetic
cgaautcttctgttcaguuu

SEQ ID NO: 776 - DNA, 20 bp, Artificial Sequence
  Synthetic
acgaattcttctgttcaguu

SEQ ID NO: 777 - DNA, 20 bp, Artificial Sequence
  Synthetic
gacgaattcttctgtucagu

SEQ ID NO: 778 - DNA, 20 bp, Artificial Sequence
  Synthetic
ggacgaattcttctguucag

SEQ ID NO: 779 - DNA, 20 bp, Artificial Sequence
  Synthetic
gggacgaattcttctguuca

SEQ ID NO: 780 - DNA, 20 bp, Artificial Sequence
  Synthetic
ugggacgaattcttcuguuc

SEQ ID NO: 781 - DNA, 20 bp, Artificial Sequence
  Synthetic
gugggacgaattcttcuguu

SEQ ID NO: 782 - DNA, 20 bp, Artificial Sequence
  Synthetic
agugggacgaattctucugu

SEQ ID NO: 783 - DNA, 20 bp, Artificial Sequence
  Synthetic
uagugggacgaattcuucug

SEQ ID NO: 784 - DNA, 20 bp, Artificial Sequence
  Synthetic
uuagugggacgaattcuucu

SEQ ID NO: 785 - DNA, 20 bp, Artificial Sequence
  Synthetic
uuuagtgggacgaatucuuc

SEQ ID NO: 786 - DNA, 20 bp, Artificial Sequence
  Synthetic
cuuuagtgggacgaauucuu

SEQ ID NO: 787 - DNA, 20 bp, Artificial Sequence
  Synthetic
ucuuuagtgggacgaauucu

SEQ ID NO: 788 - DNA, 20 bp, Artificial Sequence
  Synthetic
aucuutagtgggacgaauuc

SEQ ID NO: 789 - DNA, 20 bp, Artificial Sequence
  Synthetic
caucuttagtgggacgaauu

SEQ ID NO: 790 - DNA, 20 bp, Artificial Sequence
  Synthetic
acauctttagtgggacgaau

SEQ ID NO: 791 - DNA, 20 bp, Artificial Sequence
  Synthetic
gacauctttagtgggacgaa

SEQ ID NO: 792 - DNA, 20 bp, Artificial Sequence
  Synthetic
ugacatctttagtgggacga

SEQ ID NO: 793 - DNA, 20 bp, Artificial Sequence
  Synthetic
cugacatctttagtgggacg

SEQ ID NO: 794 - DNA, 20 bp, Artificial Sequence
  Synthetic
ucugacatctttagtgggac

SEQ ID NO: 795 - DNA, 20 bp, Artificial Sequence
  Synthetic
gucugacatctttaguggga

SEQ ID NO: 796 - DNA, 20 bp, Artificial Sequence
  Synthetic
ggucugacatctttaguggg

SEQ ID NO: 797 - DNA, 20 bp, Artificial Sequence
  Synthetic
ggguctgacatctttagugg

SEQ ID NO: 798 - DNA, 20 bp, Artificial Sequence
  Synthetic
uggguctgacatcttuagug

SEQ ID NO: 799 - DNA, 20 bp, Artificial Sequence
  Synthetic
augggtctgacatctuuagu

SEQ ID NO: 800 - DNA, 20 bp, Artificial Sequence
  Synthetic
gaugggtctgacatcuuuag

SEQ ID NO: 801 - DNA, 20 bp, Artificial Sequence
  Synthetic
ugaugggtctgacatcuuua

SEQ ID NO: 802 - DNA, 20 bp, Artificial Sequence
  Synthetic
uugaugggtctgacaucuuu

SEQ ID NO: 803 - DNA, 20 bp, Artificial Sequence
  Synthetic
guugatgggtctgacaucuu

SEQ ID NO: 804 - DNA, 20 bp, Artificial Sequence
  Synthetic
cguugatgggtctgacaucu

SEQ ID NO: 805 - DNA, 20 bp, Artificial Sequence
  Synthetic
acguugatgggtctgacauc

SEQ ID NO: 806 - DNA, 20 bp, Artificial Sequence
  Synthetic
gacgutgatgggtctgacau

SEQ ID NO: 807 - DNA, 20 bp, Artificial Sequence
  Synthetic
agacgttgatgggtcugaca

SEQ ID NO: 808 - DNA, 20 bp, Artificial Sequence
  Synthetic
gagacgttgatgggtcugac

SEQ ID NO: 809 - DNA, 20 bp, Artificial Sequence
  Synthetic
ggagacgttgatgggucuga

SEQ ID NO: 810 - DNA, 20 bp, Artificial Sequence
  Synthetic
aggagacgttgatgggucug

SEQ ID NO: 811 - DNA, 20 bp, Artificial Sequence
  Synthetic
gaggagacgttgatgggucu

SEQ ID NO: 812 - DNA, 20 bp, Artificial Sequence
  Synthetic
agaggagacgttgatggguc

SEQ ID NO: 813 - DNA, 20 bp, Artificial Sequence
  Synthetic
gagaggagacgttgaugggu

SEQ ID NO: 814 - DNA, 20 bp, Artificial Sequence
  Synthetic
ugagaggagacgttgauggg

SEQ ID NO: 815 - DNA, 20 bp, Artificial Sequence
  Synthetic
augagaggagacgttgaugg

SEQ ID NO: 816 - DNA, 20 bp, Artificial Sequence
  Synthetic
aaugagaggagacgtugaug

SEQ ID NO: 817 - RNA, 20 nt, Artificial Sequence
  Synthetic
caaugagaggagacguugau

SEQ ID NO: 818 - RNA, 20 nt, Artificial Sequence
  Synthetic
acaaugagaggagacguuga

SEQ ID NO: 819 - DNA, 20 bp, Artificial Sequence
  Synthetic
gacaatgagaggagacguug

SEQ ID NO: 820 - DNA, 20 bp, Artificial Sequence
  Synthetic
ggacaatgagaggagacguu

SEQ ID NO: 821 - DNA, 20 bp, Artificial Sequence
  Synthetic
gggacaatgagaggagacgu

SEQ ID NO: 822 - DNA, 20 bp, Artificial Sequence
  Synthetic
agggacaatgagaggagacg

SEQ ID NO: 823 - DNA, 20 bp, Artificial Sequence
  Synthetic
gagggacaatgagaggagac

SEQ ID NO: 824 - DNA, 20 bp, Artificial Sequence
  Synthetic
agagggacaatgagaggaga

SEQ ID NO: 825 - DNA, 20 bp, Artificial Sequence
  Synthetic
cagagggacaatgagaggag

SEQ ID NO: 826 - DNA, 20 bp, Artificial Sequence
  Synthetic
gcagagggacaatgagagga

SEQ ID NO: 827 - DNA, 20 bp, Artificial Sequence
  Synthetic
agcagagggacaatgagagg

SEQ ID NO: 828 - DNA, 20 bp, Artificial Sequence
  Synthetic
cagcagagggacaatgagag

SEQ ID NO: 829 - RNA, 20 nt, Artificial Sequence
  Synthetic
ccagcagagggacaaugaga

SEQ ID NO: 830 - RNA, 20 nt, Artificial Sequence
  Synthetic
cccagcagagggacaaugag

SEQ ID NO: 831 - RNA, 20 nt, Artificial Sequence
  Synthetic
ucccagcagagggacaauga

SEQ ID NO: 832 - RNA, 20 nt, Artificial Sequence
  Synthetic
gucccagcagagggacaaug

SEQ ID NO: 833 - RNA, 20 nt, Artificial Sequence
  Synthetic
ugucccagcagagggacaau

SEQ ID NO: 834 - RNA, 20 nt, Artificial Sequence
  Synthetic
uugucccagcagagggacaa

SEQ ID NO: 835 - RNA, 20 nt, Artificial Sequence
  Synthetic
uuugucccagcagagggaca

SEQ ID NO: 836 - DNA, 20 bp, Artificial Sequence
  Synthetic
cuuugtcccagcagagggac

SEQ ID NO: 837 - DNA, 20 bp, Artificial Sequence
  Synthetic
acuuugtcccagcagaggga

SEQ ID NO: 838 - DNA, 20 bp, Artificial Sequence
  Synthetic
cacuutgtcccagcagaggg

SEQ ID NO: 839 - DNA, 20 bp, Artificial Sequence
  Synthetic
gcacuttgtcccagcagagg

SEQ ID NO: 840 - DNA, 20 bp, Artificial Sequence
  Synthetic
agcactttgtcccagcagag

SEQ ID NO: 841 - DNA, 20 bp, Artificial Sequence
  Synthetic
aagcactttgtcccagcaga

SEQ ID NO: 842 - DNA, 20 bp, Artificial Sequence
  Synthetic
caagcactttgtcccagcag

SEQ ID NO: 843 - DNA, 20 bp, Artificial Sequence
  Synthetic
ccaagcactttgtcccagca

SEQ ID NO: 844 - DNA, 20 bp, Artificial Sequence
  Synthetic
accaagcactttgtcccagc

SEQ ID NO: 845 - DNA, 20 bp, Artificial Sequence
  Synthetic
caccaagcactttgtcccag

SEQ ID NO: 846 - DNA, 20 bp, Artificial Sequence
  Synthetic
acaccaagcactttguccca

SEQ ID NO: 847 - DNA, 20 bp, Artificial Sequence
  Synthetic
gacaccaagcactttguccc

SEQ ID NO: 848 - DNA, 20 bp, Artificial Sequence
  Synthetic
agacaccaagcacttugucc

SEQ ID NO: 849 - DNA, 20 bp, Artificial Sequence
  Synthetic
cagacaccaagcactuuguc

SEQ ID NO: 850 - RNA, 20 nt, Artificial Sequence
  Synthetic
ccagacaccaagcacuuugu

SEQ ID NO: 851 - RNA, 20 nt, Artificial Sequence
  Synthetic
gccagacaccaagcacuuug

SEQ ID NO: 852 - RNA, 20 nt, Artificial Sequence
  Synthetic
agccagacaccaagcacuuu

SEQ ID NO: 853 - RNA, 20 nt, Artificial Sequence
  Synthetic
cagccagacaccaagcacuu

SEQ ID NO: 854 - RNA, 20 nt, Artificial Sequence
  Synthetic
ccagccagacaccaagcacu

SEQ ID NO: 855 - DNA, 20 bp, Artificial Sequence
  Synthetic
cccagccagacaccaagcac

SEQ ID NO: 856 - DNA, 20 bp, Artificial Sequence
  Synthetic
ccccagccagacaccaagca

SEQ ID NO: 857 - DNA, 20 bp, Artificial Sequence
  Synthetic
cccccagccagacaccaagc

SEQ ID NO: 858 - RNA, 20 nt, Artificial Sequence
  Synthetic
ucccccagccagacaccaag

SEQ ID NO: 859 - RNA, 20 nt, Artificial Sequence
  Synthetic
gucccccagccagacaccaa

SEQ ID NO: 860 - RNA, 20 nt, Artificial Sequence
  Synthetic
ugucccccagccagacacca

SEQ ID NO: 861 - RNA, 20 nt, Artificial Sequence
  Synthetic
uugucccccagccagacacc

SEQ ID NO: 862 - RNA, 20 nt, Artificial Sequence
  Synthetic
guugucccccagccagacac

SEQ ID NO: 863 - DNA, 20 bp, Artificial Sequence
  Synthetic
gguugtcccccagccagaca

SEQ ID NO: 864 - DNA, 20 bp, Artificial Sequence
  Synthetic
ugguugtcccccagccagac

SEQ ID NO: 865 - DNA, 20 bp, Artificial Sequence
  Synthetic
uuggutgtcccccagccaga

SEQ ID NO: 866 - DNA, 20 bp, Artificial Sequence
  Synthetic
cuuggttgtcccccagccag

SEQ ID NO: 867 - DNA, 20 bp, Artificial Sequence
  Synthetic
ucuuggttgtcccccagcca

SEQ ID NO: 868 - DNA, 20 bp, Artificial Sequence
  Synthetic
cucuuggttgtcccccagcc

SEQ ID NO: 869 - DNA, 20 bp, Artificial Sequence
  Synthetic
gcucutggttgtcccccagc

SEQ ID NO: 870 - DNA, 20 bp, Artificial Sequence
  Synthetic
ggcucttggttgtcccccag

SEQ ID NO: 871 - DNA, 20 bp, Artificial Sequence
  Synthetic
gggcucttggttgtccccca

SEQ ID NO: 872 - DNA, 20 bp, Artificial Sequence
  Synthetic
ggggctcttggttgtccccc

SEQ ID NO: 873 - DNA, 20 bp, Artificial Sequence
  Synthetic
gggggctcttggttgucccc

SEQ ID NO: 874 - DNA, 20 bp, Artificial Sequence
  Synthetic
ugggggctcttggttguccc

SEQ ID NO: 875 - DNA, 20 bp, Artificial Sequence
  Synthetic
uugggggctcttggtugucc

SEQ ID NO: 876 - DNA, 20 bp, Artificial Sequence
  Synthetic
cuugggggctcttgguuguc

SEQ ID NO: 877 - DNA, 20 bp, Artificial Sequence
  Synthetic
acuugggggctcttgguugu

SEQ ID NO: 878 - DNA, 20 bp, Artificial Sequence
  Synthetic
cacuugggggctcttgguug

SEQ ID NO: 879 - DNA, 20 bp, Artificial Sequence
  Synthetic
gcacutgggggctctugguu

SEQ ID NO: 880 - DNA, 20 bp, Artificial Sequence
  Synthetic
ugcacttgggggctcuuggu

SEQ ID NO: 881 - DNA, 20 bp, Artificial Sequence
  Synthetic
gugcacttgggggctcuugg

SEQ ID NO: 882 - DNA, 20 bp, Artificial Sequence
  Synthetic
agugcacttgggggcucuug

SEQ ID NO: 883 - DNA, 20 bp, Artificial Sequence
  Synthetic
aagugcacttgggggcucuu

SEQ ID NO: 884 - DNA, 20 bp, Artificial Sequence
  Synthetic
gaagugcacttgggggcucu

SEQ ID NO: 885 - DNA, 20 bp, Artificial Sequence
  Synthetic
ggaagtgcacttgggggcuc

SEQ ID NO: 886 - DNA, 20 bp, Artificial Sequence
  Synthetic
gggaagtgcacttgggggcu

SEQ ID NO: 887 - DNA, 20 bp, Artificial Sequence
  Synthetic
agggaagtgcacttgggggc

SEQ ID NO: 888 - DNA, 20 bp, Artificial Sequence
  Synthetic
uagggaagtgcacttggggg

SEQ ID NO: 889 - DNA, 20 bp, Artificial Sequence
  Synthetic
uuagggaagtgcactugggg

SEQ ID NO: 890 - DNA, 20 bp, Artificial Sequence
  Synthetic
cuuagggaagtgcacuuggg

SEQ ID NO: 891 - DNA, 20 bp, Artificial Sequence
  Synthetic
ccuuagggaagtgcacuugg

SEQ ID NO: 892 - DNA, 20 bp, Artificial Sequence
  Synthetic
accuuagggaagtgcacuug

SEQ ID NO: 893 - DNA, 20 bp, Artificial Sequence
  Synthetic
gaccutagggaagtgcacuu

SEQ ID NO: 894 - DNA, 20 bp, Artificial Sequence
  Synthetic
ggaccttagggaagtgcacu

SEQ ID NO: 895 - DNA, 20 bp, Artificial Sequence
  Synthetic
aggaccttagggaagugcac

SEQ ID NO: 896 - DNA, 20 bp, Artificial Sequence
  Synthetic
gaggaccttagggaagugca

SEQ ID NO: 897 - DNA, 20 bp, Artificial Sequence
  Synthetic
ggaggaccttagggaagugc

SEQ ID NO: 898 - DNA, 20 bp, Artificial Sequence
  Synthetic
uggaggaccttagggaagug

SEQ ID NO: 899 - DNA, 20 bp, Artificial Sequence
  Synthetic
cuggaggaccttagggaagu

SEQ ID NO: 900 - DNA, 20 bp, Artificial Sequence
  Synthetic
acuggaggaccttagggaag

SEQ ID NO: 901 - DNA, 20 bp, Artificial Sequence
  Synthetic
cacuggaggaccttagggaa

SEQ ID NO: 902 - DNA, 20 bp, Artificial Sequence
  Synthetic
gcacuggaggaccttaggga

SEQ ID NO: 903 - DNA, 20 bp, Artificial Sequence
  Synthetic
agcactggaggacctuaggg

SEQ ID NO: 904 - DNA, 20 bp, Artificial Sequence
  Synthetic
aagcactggaggaccuuagg

SEQ ID NO: 905 - DNA, 20 bp, Artificial Sequence
  Synthetic
caagcactggaggaccuuag

SEQ ID NO: 906 - DNA, 20 bp, Artificial Sequence
  Synthetic
ucaagcactggaggaccuua

SEQ ID NO: 907 - DNA, 20 bp, Artificial Sequence
  Synthetic
uucaagcactggaggaccuu

SEQ ID NO: 908 - DNA, 20 bp, Artificial Sequence
  Synthetic
auucaagcactggaggaccu

SEQ ID NO: 909 - DNA, 20 bp, Artificial Sequence
  Synthetic
uauucaagcactggaggacc

SEQ ID NO: 910 - DNA, 20 bp, Artificial Sequence
  Synthetic
auauucaagcactggaggac

SEQ ID NO: 911 - DNA, 20 bp, Artificial Sequence
  Synthetic
gauautcaagcactggagga

SEQ ID NO: 912 - DNA, 20 bp, Artificial Sequence
  Synthetic
ugauattcaagcactggagg

SEQ ID NO: 913 - DNA, 20 bp, Artificial Sequence
  Synthetic
cugauattcaagcacuggag

SEQ ID NO: 914 - DNA, 20 bp, Artificial Sequence
  Synthetic
gcugatattcaagcacugga

SEQ ID NO: 915 - DNA, 20 bp, Artificial Sequence
  Synthetic
cgcugatattcaagcacugg

SEQ ID NO: 916 - DNA, 20 bp, Artificial Sequence
  Synthetic
acgcugatattcaagcacug

SEQ ID NO: 917 - DNA, 20 bp, Artificial Sequence
  Synthetic
cacgctgatattcaagcacu

SEQ ID NO: 918 - DNA, 20 bp, Artificial Sequence
  Synthetic
gcacgctgatattcaagcac

SEQ ID NO: 919 - DNA, 20 bp, Artificial Sequence
  Synthetic
agcacgctgatattcaagca

SEQ ID NO: 920 - DNA, 20 bp, Artificial Sequence
  Synthetic
uagcacgctgatattcaagc

SEQ ID NO: 921 - DNA, 20 bp, Artificial Sequence
  Synthetic
uuagcacgctgatatucaag

SEQ ID NO: 922 - DNA, 20 bp, Artificial Sequence
  Synthetic
cuuagcacgctgatauucaa

SEQ ID NO: 923 - DNA, 20 bp, Artificial Sequence
  Synthetic
acuuagcacgctgatauuca

SEQ ID NO: 924 - DNA, 20 bp, Artificial Sequence
  Synthetic
gacuuagcacgctgauauuc

SEQ ID NO: 925 - DNA, 20 bp, Artificial Sequence
  Synthetic
ugacutagcacgctgauauu

SEQ ID NO: 926 - DNA, 20 bp, Artificial Sequence
  Synthetic
cugacttagcacgctgauau

SEQ ID NO: 927 - DNA, 20 bp, Artificial Sequence
  Synthetic
ucugacttagcacgcugaua

SEQ ID NO: 928 - DNA, 20 bp, Artificial Sequence
  Synthetic
uucugacttagcacgcugau

SEQ ID NO: 929 - DNA, 20 bp, Artificial Sequence
  Synthetic
uuucugacttagcacgcuga

SEQ ID NO: 930 - DNA, 20 bp, Artificial Sequence
  Synthetic
uuuuctgacttagcacgcug

SEQ ID NO: 931 - DNA, 20 bp, Artificial Sequence
  Synthetic
cuuuuctgacttagcacgcu

SEQ ID NO: 932 - DNA, 20 bp, Artificial Sequence
  Synthetic
ccuuutctgacttagcacgc

SEQ ID NO: 933 - DNA, 20 bp, Artificial Sequence
  Synthetic
accuuttctgacttagcacg

SEQ ID NO: 934 - DNA, 20 bp, Artificial Sequence
  Synthetic
caccutttctgacttagcac

SEQ ID NO: 935 - DNA, 20 bp, Artificial Sequence
  Synthetic
gcaccttttctgactuagca

SEQ ID NO: 936 - DNA, 20 bp, Artificial Sequence
  Synthetic
cgcaccttttctgacuuagc

SEQ ID NO: 937 - DNA, 20 bp, Artificial Sequence
  Synthetic
ucgcaccttttctgacuuag

SEQ ID NO: 938 - DNA, 20 bp, Artificial Sequence
  Synthetic
cucgcaccttttctgacuua

SEQ ID NO: 939 - DNA, 20 bp, Artificial Sequence
  Synthetic
ccucgcaccttttctgacuu

SEQ ID NO: 940 - DNA, 20 bp, Artificial Sequence
  Synthetic
uccucgcaccttttcugacu

SEQ ID NO: 941 - DNA, 20 bp, Artificial Sequence
  Synthetic
auccucgcaccttttcugac

SEQ ID NO: 942 - DNA, 20 bp, Artificial Sequence
  Synthetic
caucctcgcacctttucuga

SEQ ID NO: 943 - DNA, 20 bp, Artificial Sequence
  Synthetic
gcaucctcgcaccttuucug

SEQ ID NO: 944 - DNA, 20 bp, Artificial Sequence
  Synthetic
agcaucctcgcacctuuucu

SEQ ID NO: 945 - DNA, 20 bp, Artificial Sequence
  Synthetic
aagcatcctcgcaccuuuuc

SEQ ID NO: 946 - DNA, 20 bp, Artificial Sequence
  Synthetic
uaagcatcctcgcaccuuuu

SEQ ID NO: 947 - DNA, 20 bp, Artificial Sequence
  Synthetic
guaagcatcctcgcaccuuu

SEQ ID NO: 948 - DNA, 20 bp, Artificial Sequence
  Synthetic
gguaagcatcctcgcaccuu

SEQ ID NO: 949 - DNA, 20 bp, Artificial Sequence
  Synthetic
ggguaagcatcctcgcaccu

SEQ ID NO: 950 - DNA, 20 bp, Artificial Sequence
  Synthetic
cggguaagcatcctcgcacc

SEQ ID NO: 951 - DNA, 20 bp, Artificial Sequence
  Synthetic
ucgggtaagcatcctcgcac

SEQ ID NO: 952 - DNA, 20 bp, Artificial Sequence
  Synthetic
cucgggtaagcatccucgca

SEQ ID NO: 953 - DNA, 20 bp, Artificial Sequence
  Synthetic
ucucgggtaagcatccucgc

SEQ ID NO: 954 - DNA, 20 bp, Artificial Sequence
  Synthetic
gucucgggtaagcatccucg

SEQ ID NO: 955 - DNA, 20 bp, Artificial Sequence
  Synthetic
ugucucgggtaagcauccuc

SEQ ID NO: 956 - DNA, 20 bp, Artificial Sequence
  Synthetic
cuguctcgggtaagcauccu

SEQ ID NO: 957 - DNA, 20 bp, Artificial Sequence
  Synthetic
ucuguctcgggtaagcaucc

SEQ ID NO: 958 - DNA, 20 bp, Artificial Sequence
  Synthetic
aucugtctcgggtaagcauc

SEQ ID NO: 959 - DNA, 20 bp, Artificial Sequence
  Synthetic
uaucugtctcgggtaagcau

SEQ ID NO: 960 - DNA, 20 bp, Artificial Sequence
  Synthetic
cuauctgtctcgggtaagca

SEQ ID NO: 961 - DNA, 20 bp, Artificial Sequence
  Synthetic
ucuauctgtctcggguaagc

SEQ ID NO: 962 - DNA, 20 bp, Artificial Sequence
  Synthetic
aucuatctgtctcggguaag

SEQ ID NO: 963 - DNA, 20 bp, Artificial Sequence
  Synthetic
caucuatctgtctcggguaa

SEQ ID NO: 964 - DNA, 20 bp, Artificial Sequence
  Synthetic
ucauctatctgtctcgggua

SEQ ID NO: 965 - DNA, 20 bp, Artificial Sequence
  Synthetic
gucauctatctgtctcgggu

SEQ ID NO: 966 - DNA, 20 bp, Artificial Sequence
  Synthetic
ugucatctatctgtcucggg

SEQ ID NO: 967 - DNA, 20 bp, Artificial Sequence
  Synthetic
gugucatctatctgtcucgg

SEQ ID NO: 968 - DNA, 20 bp, Artificial Sequence
  Synthetic
ggugucatctatctgucucg

SEQ ID NO: 969 - DNA, 20 bp, Artificial Sequence
  Synthetic
uggugtcatctatctgucuc

SEQ ID NO: 970 - DNA, 20 bp, Artificial Sequence
  Synthetic
auggugtcatctatcugucu

SEQ ID NO: 971 - DNA, 20 bp, Artificial Sequence
  Synthetic
cauggtgtcatctatcuguc

SEQ ID NO: 972 - DNA, 20 bp, Artificial Sequence
  Synthetic
acauggtgtcatctaucugu

SEQ ID NO: 973 - DNA, 20 bp, Artificial Sequence
  Synthetic
aacauggtgtcatctaucug

SEQ ID NO: 974 - DNA, 20 bp, Artificial Sequence
  Synthetic
gaacatggtgtcatcuaucu

SEQ ID NO: 975 - DNA, 20 bp, Artificial Sequence
  Synthetic
agaacatggtgtcatcuauc

SEQ ID NO: 976 - DNA, 20 bp, Artificial Sequence
  Synthetic
cagaacatggtgtcaucuau

SEQ ID NO: 977 - DNA, 20 bp, Artificial Sequence
  Synthetic
gcagaacatggtgtcaucua

SEQ ID NO: 978 - DNA, 20 bp, Artificial Sequence
  Synthetic
cgcagaacatggtgtcaucu

SEQ ID NO: 979 - DNA, 20 bp, Artificial Sequence
  Synthetic
gcgcagaacatggtgucauc

SEQ ID NO: 980 - DNA, 20 bp, Artificial Sequence
  Synthetic
ggcgcagaacatggtgucau

SEQ ID NO: 981 - DNA, 20 bp, Artificial Sequence
  Synthetic
cggcgcagaacatgguguca

SEQ ID NO: 982 - DNA, 20 bp, Artificial Sequence
  Synthetic
ccggcgcagaacatgguguc

SEQ ID NO: 983 - DNA, 20 bp, Artificial Sequence
  Synthetic
accggcgcagaacatggugu

SEQ ID NO: 984 - RNA, 20 nt, Artificial Sequence
  Synthetic
caccggcgcagaacauggug

SEQ ID NO: 985 - RNA, 20 nt, Artificial Sequence
  Synthetic
ucaccggcgcagaacauggu

SEQ ID NO: 986 - RNA, 20 nt, Artificial Sequence
  Synthetic
gucaccggcgcagaacaugg

SEQ ID NO: 987 - RNA, 20 nt, Artificial Sequence
  Synthetic
ugucaccggcgcagaacaug

SEQ ID NO: 988 - RNA, 20 nt, Artificial Sequence
  Synthetic
uugucaccggcgcagaacau

SEQ ID NO: 989 - RNA, 20 nt, Artificial Sequence
  Synthetic
uuugucaccggcgcagaaca

SEQ ID NO: 990 - DNA, 20 bp, Artificial Sequence
  Synthetic
cuuugtcaccggcgcagaac

SEQ ID NO: 991 - DNA, 20 bp, Artificial Sequence
  Synthetic
gcuuugtcaccggcgcagaa

SEQ ID NO: 992 - DNA, 20 bp, Artificial Sequence
  Synthetic
ugcuutgtcaccggcgcaga

SEQ ID NO: 993 - DNA, 20 bp, Artificial Sequence
  Synthetic
cugcuttgtcaccggcgcag

SEQ ID NO: 994 - DNA, 20 bp, Artificial Sequence
  Synthetic
ccugctttgtcaccggcgca

SEQ ID NO: 995 - DNA, 20 bp, Artificial Sequence
  Synthetic
accugctttgtcaccggcgc

SEQ ID NO: 996 - DNA, 20 bp, Artificial Sequence
  Synthetic
uaccugctttgtcaccggcg

SEQ ID NO: 997 - DNA, 20 bp, Artificial Sequence
  Synthetic
cuacctgctttgtcaccggc

SEQ ID NO: 998 - DNA, 20 bp, Artificial Sequence
  Synthetic
ucuacctgctttgtcaccgg

SEQ ID NO: 999 - DNA, 20 bp, Artificial Sequence
  Synthetic
cucuacctgctttgtcaccg

SEQ ID NO: 1000 - DNA, 20 bp, Artificial Sequence
  Synthetic
ucucuacctgctttgucacc

SEQ ID NO: 1001 - DNA, 20 bp, Artificial Sequence
  Synthetic
gucuctacctgctttgucac

SEQ ID NO: 1002 - DNA, 20 bp, Artificial Sequence
  Synthetic
agucuctacctgcttuguca

SEQ ID NO: 1003 - DNA, 20 bp, Artificial Sequence
  Synthetic
gaguctctacctgctuuguc

SEQ ID NO: 1004 - DNA, 20 bp, Artificial Sequence
  Synthetic
ggaguctctacctgcuuugu

SEQ ID NO: 1005 - DNA, 20 bp, Artificial Sequence
  Synthetic
aggagtctctacctgcuuug

SEQ ID NO: 1006 - DNA, 20 bp, Artificial Sequence
  Synthetic
caggagtctctacctgcuuu

SEQ ID NO: 1007 - DNA, 20 bp, Artificial Sequence
  Synthetic
gcaggagtctctaccugcuu

SEQ ID NO: 1008 - DNA, 20 bp, Artificial Sequence
  Synthetic
ggcaggagtctctaccugcu

SEQ ID NO: 1009 - DNA, 20 bp, Artificial Sequence
  Synthetic
uggcaggagtctctaccugc

SEQ ID NO: 1010 - DNA, 20 bp, Artificial Sequence
  Synthetic
cuggcaggagtctctaccug

SEQ ID NO: 1011 - DNA, 20 bp, Artificial Sequence
  Synthetic
ccuggcaggagtctcuaccu

SEQ ID NO: 1012 - DNA, 20 bp, Artificial Sequence
  Synthetic
cccuggcaggagtctcuacc

SEQ ID NO: 1013 - DNA, 20 bp, Artificial Sequence
  Synthetic
acccuggcaggagtcucuac

SEQ ID NO: 1014 - DNA, 20 bp, Artificial Sequence
  Synthetic
caccctggcaggagtcucua

SEQ ID NO: 1015 - DNA, 20 bp, Artificial Sequence
  Synthetic
ucaccctggcaggagucucu

SEQ ID NO: 1016 - DNA, 20 bp, Artificial Sequence
  Synthetic
aucaccctggcaggagucuc

SEQ ID NO: 1017 - DNA, 20 bp, Artificial Sequence
  Synthetic
aaucaccctggcaggagucu

SEQ ID NO: 1018 - DNA, 20 bp, Artificial Sequence
  Synthetic
gaaucaccctggcaggaguc

SEQ ID NO: 1019 - DNA, 20 bp, Artificial Sequence
  Synthetic
agaaucaccctggcaggagu

SEQ ID NO: 1020 - DNA, 20 bp, Artificial Sequence
  Synthetic
cagaatcaccctggcaggag

SEQ ID NO: 1021 - DNA, 20 bp, Artificial Sequence
  Synthetic
ccagaatcaccctggcagga

SEQ ID NO: 1022 - DNA, 20 bp, Artificial Sequence
  Synthetic
cccagaatcaccctggcagg

SEQ ID NO: 1023 - DNA, 20 bp, Artificial Sequence
  Synthetic
ccccagaatcaccctggcag

SEQ ID NO: 1024 - DNA, 20 bp, Artificial Sequence
  Synthetic
cccccagaatcacccuggca

SEQ ID NO: 1025 - DNA, 20 bp, Artificial Sequence
  Synthetic
ccccccagaatcacccuggc

SEQ ID NO: 1026 - DNA, 20 bp, Artificial Sequence
  Synthetic
gccccccagaatcacccugg

SEQ ID NO: 1027 - DNA, 20 bp, Artificial Sequence
  Synthetic
ggccccccagaatcacccug

SEQ ID NO: 1028 - DNA, 20 bp, Artificial Sequence
  Synthetic
aggccccccagaatcacccu

SEQ ID NO: 1029 - DNA, 20 bp, Artificial Sequence
  Synthetic
caggccccccagaatcaccc

SEQ ID NO: 1030 - RNA, 20 nt, Artificial Sequence
  Synthetic
acaggccccccagaaucacc

SEQ ID NO: 1031 - RNA, 20 nt, Artificial Sequence
  Synthetic
cacaggccccccagaaucac

SEQ ID NO: 1032 - RNA, 20 nt, Artificial Sequence
  Synthetic
ccacaggccccccagaauca

SEQ ID NO: 1033 - RNA, 20 nt, Artificial Sequence
  Synthetic
accacaggccccccagaauc

SEQ ID NO: 1034 - RNA, 20 nt, Artificial Sequence
  Synthetic
gaccacaggccccccagaau

SEQ ID NO: 1035 - DNA, 20 bp, Artificial Sequence
  Synthetic
agaccacaggccccccagaa

SEQ ID NO: 1036 - DNA, 20 bp, Artificial Sequence
  Synthetic
cagaccacaggccccccaga

SEQ ID NO: 1037 - DNA, 20 bp, Artificial Sequence
  Synthetic
gcagaccacaggccccccag

SEQ ID NO: 1038 - RNA, 20 nt, Artificial Sequence
  Synthetic
ugcagaccacaggcccccca

SEQ ID NO: 1039 - RNA, 20 nt, Artificial Sequence
  Synthetic
uugcagaccacaggcccccc

SEQ ID NO: 1040 - RNA, 20 nt, Artificial Sequence
  Synthetic
auugcagaccacaggccccc

SEQ ID NO: 1041 - RNA, 20 nt, Artificial Sequence
  Synthetic
cauugcagaccacaggcccc

SEQ ID NO: 1042 - RNA, 20 nt, Artificial Sequence
  Synthetic
ccauugcagaccacaggccc

SEQ ID NO: 1043 - DNA, 20 bp, Artificial Sequence
  Synthetic
gccautgcagaccacaggcc

SEQ ID NO: 1044 - DNA, 20 bp, Artificial Sequence
  Synthetic
agccattgcagaccacaggc

SEQ ID NO: 1045 - DNA, 20 bp, Artificial Sequence
  Synthetic
gagccattgcagaccacagg

SEQ ID NO: 1046 - DNA, 20 bp, Artificial Sequence
  Synthetic
ggagccattgcagaccacag

SEQ ID NO: 1047 - DNA, 20 bp, Artificial Sequence
  Synthetic
gggagccattgcagaccaca

SEQ ID NO: 1048 - DNA, 20 bp, Artificial Sequence
  Synthetic
agggagccattgcagaccac

SEQ ID NO: 1049 - DNA, 20 bp, Artificial Sequence
  Synthetic
cagggagccattgcagacca

SEQ ID NO: 1050 - DNA, 20 bp, Artificial Sequence
  Synthetic
gcagggagccattgcagacc

SEQ ID NO: 1051 - DNA, 20 bp, Artificial Sequence
  Synthetic
ugcagggagccattgcagac

SEQ ID NO: 1052 - DNA, 20 bp, Artificial Sequence
  Synthetic
cugcagggagccattgcaga

SEQ ID NO: 1053 - DNA, 20 bp, Artificial Sequence
  Synthetic
ccugcagggagccatugcag

SEQ ID NO: 1054 - RNA, 20 nt, Artificial Sequence
  Synthetic
cccugcagggagccauugca

SEQ ID NO: 1055 - RNA, 20 nt, Artificial Sequence
  Synthetic
ucccugcagggagccauugc

SEQ ID NO: 1056 - DNA, 20 bp, Artificial Sequence
  Synthetic
guccctgcagggagccauug

SEQ ID NO: 1057 - DNA, 20 bp, Artificial Sequence
  Synthetic
aguccctgcagggagccauu

SEQ ID NO: 1058 - DNA, 20 bp, Artificial Sequence
  Synthetic
gaguccctgcagggagccau

SEQ ID NO: 1059 - DNA, 20 bp, Artificial Sequence
  Synthetic
cgaguccctgcagggagcca

SEQ ID NO: 1060 - DNA, 20 bp, Artificial Sequence
  Synthetic
acgagtccctgcagggagcc

SEQ ID NO: 1061 - DNA, 20 bp, Artificial Sequence
  Synthetic
cacgagtccctgcagggagc

SEQ ID NO: 1062 - DNA, 20 bp, Artificial Sequence
  Synthetic
acacgagtccctgcagggag

SEQ ID NO: 1063 - DNA, 20 bp, Artificial Sequence
  Synthetic
gacacgagtccctgcaggga

SEQ ID NO: 1064 - DNA, 20 bp, Artificial Sequence
  Synthetic
ggacacgagtccctgcaggg

SEQ ID NO: 1065 - DNA, 20 bp, Artificial Sequence
  Synthetic
aggacacgagtccctgcagg

SEQ ID NO: 1066 - DNA, 20 bp, Artificial Sequence
  Synthetic
caggacacgagtcccugcag

SEQ ID NO: 1067 - DNA, 20 bp, Artificial Sequence
  Synthetic
ccaggacacgagtcccugca

SEQ ID NO: 1068 - DNA, 20 bp, Artificial Sequence
  Synthetic
cccaggacacgagtcccugc

SEQ ID NO: 1069 - DNA, 20 bp, Artificial Sequence
  Synthetic
ccccaggacacgagtcccug

SEQ ID NO: 1070 - RNA, 20 nt, Artificial Sequence
  Synthetic
uccccaggacacgagucccu

SEQ ID NO: 1071 - RNA, 20 nt, Artificial Sequence
  Synthetic
cuccccaggacacgaguccc

SEQ ID NO: 1072 - RNA, 20 nt, Artificial Sequence
  Synthetic
ucuccccaggacacgagucc

SEQ ID NO: 1073 - RNA, 20 nt, Artificial Sequence
  Synthetic
aucuccccaggacacgaguc

SEQ ID NO: 1074 - RNA, 20 nt, Artificial Sequence
  Synthetic
aaucuccccaggacacgagu

SEQ ID NO: 1075 - DNA, 20 bp, Artificial Sequence
  Synthetic
uaauctccccaggacacgag

SEQ ID NO: 1076 - DNA, 20 bp, Artificial Sequence
  Synthetic
guaauctccccaggacacga

SEQ ID NO: 1077 - DNA, 20 bp, Artificial Sequence
  Synthetic
gguaatctccccaggacacg

SEQ ID NO: 1078 - DNA, 20 bp, Artificial Sequence
  Synthetic
ggguaatctccccaggacac

SEQ ID NO: 1079 - DNA, 20 bp, Artificial Sequence
  Synthetic
aggguaatctccccaggaca

SEQ ID NO: 1080 - DNA, 20 bp, Artificial Sequence
  Synthetic
aagggtaatctccccaggac

SEQ ID NO: 1081 - DNA, 20 bp, Artificial Sequence
  Synthetic
caagggtaatctccccagga

SEQ ID NO: 1082 - DNA, 20 bp, Artificial Sequence
  Synthetic
acaagggtaatctccccagg

SEQ ID NO: 1083 - DNA, 20 bp, Artificial Sequence
  Synthetic
cacaagggtaatctccccag

SEQ ID NO: 1084 - DNA, 20 bp, Artificial Sequence
  Synthetic
gcacaagggtaatctcccca

SEQ ID NO: 1085 - DNA, 20 bp, Artificial Sequence
  Synthetic
ggcacaagggtaatcucccc

SEQ ID NO: 1086 - DNA, 20 bp, Artificial Sequence
  Synthetic
gggcacaagggtaatcuccc

SEQ ID NO: 1087 - DNA, 20 bp, Artificial Sequence
  Synthetic
cgggcacaagggtaaucucc

SEQ ID NO: 1088 - DNA, 20 bp, Artificial Sequence
  Synthetic
ccgggcacaagggtaaucuc

SEQ ID NO: 1089 - DNA, 20 bp, Artificial Sequence
  Synthetic
gccgggcacaagggtaaucu

SEQ ID NO: 1090 - RNA, 20 nt, Artificial Sequence
  Synthetic
ggccgggcacaaggguaauc

SEQ ID NO: 1091 - RNA, 20 nt, Artificial Sequence
  Synthetic
gggccgggcacaaggguaau

SEQ ID NO: 1092 - RNA, 20 nt, Artificial Sequence
  Synthetic
ugggccgggcacaaggguaa

SEQ ID NO: 1093 - RNA, 20 nt, Artificial Sequence
  Synthetic
uugggccgggcacaagggua

SEQ ID NO: 1094 - RNA, 20 nt, Artificial Sequence
  Synthetic
guugggccgggcacaagggu

SEQ ID NO: 1095 - RNA, 20 nt, Artificial Sequence
  Synthetic
uguugggccgggcacaaggg

SEQ ID NO: 1096 - RNA, 20 nt, Artificial Sequence
  Synthetic
cuguugggccgggcacaagg

SEQ ID NO: 1097 - DNA, 20 bp, Artificial Sequence
  Synthetic
ucugutgggccgggcacaag

SEQ ID NO: 1098 - DNA, 20 bp, Artificial Sequence
  Synthetic
gucugttgggccgggcacaa

SEQ ID NO: 1099 - DNA, 20 bp, Artificial Sequence
  Synthetic
ggucugttgggccgggcaca

SEQ ID NO: 1100 - DNA, 20 bp, Artificial Sequence
  Synthetic
cgguctgttgggccgggcac

SEQ ID NO: 1101 - DNA, 20 bp, Artificial Sequence
  Synthetic
ccgguctgttgggccgggca

SEQ ID NO: 1102 - DNA, 20 bp, Artificial Sequence
  Synthetic
cccggtctgttgggccgggc

SEQ ID NO: 1103 - DNA, 20 bp, Artificial Sequence
  Synthetic
acccggtctgttgggccggg

SEQ ID NO: 1104 - DNA, 20 bp, Artificial Sequence
  Synthetic
cacccggtctgttgggccgg

SEQ ID NO: 1105 - DNA, 20 bp, Artificial Sequence
  Synthetic
acacccggtctgttgggccg

SEQ ID NO: 1106 - DNA, 20 bp, Artificial Sequence
  Synthetic
gacacccggtctgttgggcc

SEQ ID NO: 1107 - DNA, 20 bp, Artificial Sequence
  Synthetic
agacacccggtctgtugggc

SEQ ID NO: 1108 - DNA, 20 bp, Artificial Sequence
  Synthetic
uagacacccggtctguuggg

SEQ ID NO: 1109 - DNA, 20 bp, Artificial Sequence
  Synthetic
guagacacccggtctguugg

SEQ ID NO: 1110 - DNA, 20 bp, Artificial Sequence
  Synthetic
uguagacacccggtcuguug

SEQ ID NO: 1111 - DNA, 20 bp, Artificial Sequence
  Synthetic
guguagacacccggtcuguu

SEQ ID NO: 1112 - RNA, 20 nt, Artificial Sequence
  Synthetic
cguguagacacccggucugu

SEQ ID NO: 1113 - DNA, 20 bp, Artificial Sequence
  Synthetic
ucgugtagacacccggucug

SEQ ID NO: 1114 - DNA, 20 bp, Artificial Sequence
  Synthetic
uucgugtagacacccggucu

SEQ ID NO: 1115 - DNA, 20 bp, Artificial Sequence
  Synthetic
guucgtgtagacacccgguc

SEQ ID NO: 1116 - DNA, 20 bp, Artificial Sequence
  Synthetic
gguucgtgtagacacccggu

SEQ ID NO: 1117 - DNA, 20 bp, Artificial Sequence
  Synthetic
agguucgtgtagacacccgg

SEQ ID NO: 1118 - DNA, 20 bp, Artificial Sequence
  Synthetic
gaggutcgtgtagacacccg

SEQ ID NO: 1119 - DNA, 20 bp, Artificial Sequence
  Synthetic
agaggttcgtgtagacaccc

SEQ ID NO: 1120 - DNA, 20 bp, Artificial Sequence
  Synthetic
cagaggttcgtgtagacacc

SEQ ID NO: 1121 - DNA, 20 bp, Artificial Sequence
  Synthetic
gcagaggttcgtgtagacac

SEQ ID NO: 1122 - DNA, 20 bp, Artificial Sequence
  Synthetic
ugcagaggttcgtgtagaca

SEQ ID NO: 1123 - DNA, 20 bp, Artificial Sequence
  Synthetic
uugcagaggttcgtguagac

SEQ ID NO: 1124 - DNA, 20 bp, Artificial Sequence
  Synthetic
cuugcagaggttcgtguaga

SEQ ID NO: 1125 - DNA, 20 bp, Artificial Sequence
  Synthetic
acuugcagaggttcguguag

SEQ ID NO: 1126 - DNA, 20 bp, Artificial Sequence
  Synthetic
aacuugcagaggttcgugua

SEQ ID NO: 1127 - DNA, 20 bp, Artificial Sequence
  Synthetic
gaacutgcagaggttcgugu

SEQ ID NO: 1128 - DNA, 20 bp, Artificial Sequence
  Synthetic
ugaacttgcagaggtucgug

SEQ ID NO: 1129 - DNA, 20 bp, Artificial Sequence
  Synthetic
gugaacttgcagagguucgu

SEQ ID NO: 1130 - DNA, 20 bp, Artificial Sequence
  Synthetic
ggugaacttgcagagguucg

SEQ ID NO: 1131 - DNA, 20 bp, Artificial Sequence
  Synthetic
uggugaacttgcagagguuc

SEQ ID NO: 1132 - DNA, 20 bp, Artificial Sequence
  Synthetic
uuggugaacttgcagagguu

SEQ ID NO: 1133 - DNA, 20 bp, Artificial Sequence
  Synthetic
cuuggtgaacttgcagaggu

SEQ ID NO: 1134 - DNA, 20 bp, Artificial Sequence
  Synthetic
acuuggtgaacttgcagagg

SEQ ID NO: 1135 - DNA, 20 bp, Artificial Sequence
  Synthetic
cacuuggtgaacttgcagag

SEQ ID NO: 1136 - DNA, 20 bp, Artificial Sequence
  Synthetic
ccacutggtgaacttgcaga

SEQ ID NO: 1137 - DNA, 20 bp, Artificial Sequence
  Synthetic
uccacttggtgaactugcag

SEQ ID NO: 1138 - DNA, 20 bp, Artificial Sequence
  Synthetic
auccacttggtgaacuugca

SEQ ID NO: 1139 - DNA, 20 bp, Artificial Sequence
  Synthetic
gauccacttggtgaacuugc

SEQ ID NO: 1140 - DNA, 20 bp, Artificial Sequence
  Synthetic
ggauccacttggtgaacuug

SEQ ID NO: 1141 - DNA, 20 bp, Artificial Sequence
  Synthetic
uggauccacttggtgaacuu

SEQ ID NO: 1142 - DNA, 20 bp, Artificial Sequence
  Synthetic
cuggatccacttggtgaacu

SEQ ID NO: 1143 - DNA, 20 bp, Artificial Sequence
  Synthetic
ccuggatccacttggugaac

SEQ ID NO: 1144 - DNA, 20 bp, Artificial Sequence
  Synthetic
uccuggatccacttggugaa

SEQ ID NO: 1145 - DNA, 20 bp, Artificial Sequence
  Synthetic
uuccuggatccacttgguga

SEQ ID NO: 1146 - DNA, 20 bp, Artificial Sequence
  Synthetic
uuucctggatccactuggug

SEQ ID NO: 1147 - DNA, 20 bp, Artificial Sequence
  Synthetic
guuucctggatccacuuggu

SEQ ID NO: 1148 - DNA, 20 bp, Artificial Sequence
  Synthetic
gguuucctggatccacuugg

SEQ ID NO: 1149 - DNA, 20 bp, Artificial Sequence
  Synthetic
ugguutcctggatccacuug

SEQ ID NO: 1150 - DNA, 20 bp, Artificial Sequence
  Synthetic
augguttcctggatccacuu

SEQ ID NO: 1151 - DNA, 20 bp, Artificial Sequence
  Synthetic
gauggtttcctggatccacu

SEQ ID NO: 1152 - DNA, 20 bp, Artificial Sequence
  Synthetic
ggauggtttcctggauccac

SEQ ID NO: 1153 - DNA, 20 bp, Artificial Sequence
  Synthetic
uggauggtttcctggaucca

SEQ ID NO: 1154 - DNA, 20 bp, Artificial Sequence
  Synthetic
cuggatggtttcctggaucc

SEQ ID NO: 1155 - DNA, 20 bp, Artificial Sequence
  Synthetic
ccuggatggtttcctggauc

SEQ ID NO: 1156 - DNA, 20 bp, Artificial Sequence
  Synthetic
gccuggatggtttccuggau

SEQ ID NO: 1157 - DNA, 20 bp, Artificial Sequence
  Synthetic
ggccuggatggtttccugga

SEQ ID NO: 1158 - DNA, 20 bp, Artificial Sequence
  Synthetic
uggcctggatggtttccugg

SEQ ID NO: 1159 - DNA, 20 bp, Artificial Sequence
  Synthetic
uuggcctggatggttuccug

SEQ ID NO: 1160 - DNA, 20 bp, Artificial Sequence
  Synthetic
guuggcctggatggtuuccu

SEQ ID NO: 1161 - DNA, 20 bp, Artificial Sequence
  Synthetic
aguuggcctggatgguuucc

SEQ ID NO: 1162 - DNA, 20 bp, Artificial Sequence
  Synthetic
gaguuggcctggatgguuuc

SEQ ID NO: 1163 - DNA, 20 bp, Artificial Sequence
  Synthetic
ggagutggcctggatgguuu

SEQ ID NO: 1164 - DNA, 20 bp, Artificial Sequence
  Synthetic
aggagttggcctggaugguu

SEQ ID NO: 1165 - DNA, 20 bp, Artificial Sequence
  Synthetic
caggagttggcctggauggu

SEQ ID NO: 1166 - DNA, 20 bp, Artificial Sequence
  Synthetic
ucaggagttggcctggaugg

SEQ ID NO: 1167 - DNA, 20 bp, Artificial Sequence
  Synthetic
cucaggagttggcctggaug

SEQ ID NO: 1168 - DNA, 20 bp, Artificial Sequence
  Synthetic
acucaggagttggccuggau

SEQ ID NO: 1169 - DNA, 20 bp, Artificial Sequence
  Synthetic
gacucaggagttggccugga

SEQ ID NO: 1170 - DNA, 20 bp, Artificial Sequence
  Synthetic
ugacucaggagttggccugg

SEQ ID NO: 1171 - DNA, 20 bp, Artificial Sequence
  Synthetic
augactcaggagttggccug

SEQ ID NO: 1172 - DNA, 20 bp, Artificial Sequence
  Synthetic
gaugactcaggagttggccu

SEQ ID NO: 1173 - DNA, 20 bp, Artificial Sequence
  Synthetic
ggaugactcaggagtuggcc

SEQ ID NO: 1174 - DNA, 20 bp, Artificial Sequence
  Synthetic
gggaugactcaggaguuggc

SEQ ID NO: 1175 - DNA, 20 bp, Artificial Sequence
  Synthetic
ugggatgactcaggaguugg

SEQ ID NO: 1176 - DNA, 20 bp, Artificial Sequence
  Synthetic
cugggatgactcaggaguug

SEQ ID NO: 1177 - DNA, 20 bp, Artificial Sequence
  Synthetic
ccugggatgactcaggaguu

SEQ ID NO: 1178 - DNA, 20 bp, Artificial Sequence
  Synthetic
uccugggatgactcaggagu

SEQ ID NO: 1179 - DNA, 20 bp, Artificial Sequence
  Synthetic
guccugggatgactcaggag

SEQ ID NO: 1180 - DNA, 20 bp, Artificial Sequence
  Synthetic
agucctgggatgactcagga

SEQ ID NO: 1181 - DNA, 20 bp, Artificial Sequence
  Synthetic
gagucctgggatgacucagg

SEQ ID NO: 1182 - DNA, 20 bp, Artificial Sequence
  Synthetic
ugagucctgggatgacucag

SEQ ID NO: 1183 - DNA, 20 bp, Artificial Sequence
  Synthetic
cugagtcctgggatgacuca

SEQ ID NO: 1184 - DNA, 20 bp, Artificial Sequence
  Synthetic
gcugagtcctgggatgacuc

SEQ ID NO: 1185 - DNA, 20 bp, Artificial Sequence
  Synthetic
ugcugagtcctgggaugacu

SEQ ID NO: 1186 - DNA, 20 bp, Artificial Sequence
  Synthetic
gugcugagtcctgggaugac

SEQ ID NO: 1187 - DNA, 20 bp, Artificial Sequence
  Synthetic
ugugctgagtcctgggauga

SEQ ID NO: 1188 - DNA, 20 bp, Artificial Sequence
  Synthetic
gugugctgagtcctgggaug

SEQ ID NO: 1189 - DNA, 20 bp, Artificial Sequence
  Synthetic
ggugugctgagtcctgggau

SEQ ID NO: 1190 - DNA, 20 bp, Artificial Sequence
  Synthetic
cggugtgctgagtccuggga

SEQ ID NO: 1191 - DNA, 20 bp, Artificial Sequence
  Synthetic
ccggugtgctgagtccuggg

SEQ ID NO: 1192 - DNA, 20 bp, Artificial Sequence
  Synthetic
gccggtgtgctgagtccugg

SEQ ID NO: 1193 - DNA, 20 bp, Artificial Sequence
  Synthetic
ugccggtgtgctgaguccug

SEQ ID NO: 1194 - DNA, 20 bp, Artificial Sequence
  Synthetic
augccggtgtgctgaguccu

SEQ ID NO: 1195 - DNA, 20 bp, Artificial Sequence
  Synthetic
gaugccggtgtgctgagucc

SEQ ID NO: 1196 - DNA, 20 bp, Artificial Sequence
  Synthetic
ggaugccggtgtgctgaguc

SEQ ID NO: 1197 - DNA, 20 bp, Artificial Sequence
  Synthetic
gggaugccggtgtgcugagu

SEQ ID NO: 1198 - DNA, 20 bp, Artificial Sequence
  Synthetic
ggggatgccggtgtgcugag

SEQ ID NO: 1199 - DNA, 20 bp, Artificial Sequence
  Synthetic
uggggatgccggtgtgcuga

SEQ ID NO: 1200 - DNA, 20 bp, Artificial Sequence
  Synthetic
guggggatgccggtgugcug

SEQ ID NO: 1201 - DNA, 20 bp, Artificial Sequence
  Synthetic
gguggggatgccggtgugcu

SEQ ID NO: 1202 - DNA, 20 bp, Artificial Sequence
  Synthetic
agguggggatgccggugugc

SEQ ID NO: 1203 - DNA, 20 bp, Artificial Sequence
  Synthetic
cagguggggatgccggugug

SEQ ID NO: 1204 - DNA, 20 bp, Artificial Sequence
  Synthetic
gcaggtggggatgccggugu

SEQ ID NO: 1205 - DNA, 20 bp, Artificial Sequence
  Synthetic
agcaggtggggatgccggug

SEQ ID NO: 1206 - DNA, 20 bp, Artificial Sequence
  Synthetic
cagcaggtggggatgccggu

SEQ ID NO: 1207 - DNA, 20 bp, Artificial Sequence
  Synthetic
gcagcaggtggggatgccgg

SEQ ID NO: 1208 - DNA, 20 bp, Artificial Sequence
  Synthetic
ugcagcaggtggggaugccg

SEQ ID NO: 1209 - DNA, 20 bp, Artificial Sequence
  Synthetic
cugcagcaggtggggaugcc

SEQ ID NO: 1210 - DNA, 20 bp, Artificial Sequence
  Synthetic
ccugcagcaggtggggaugc

SEQ ID NO: 1211 - DNA, 20 bp, Artificial Sequence
  Synthetic
cccugcagcaggtggggaug

SEQ ID NO: 1212 - DNA, 20 bp, Artificial Sequence
  Synthetic
ucccugcagcaggtggggau

SEQ ID NO: 1213 - DNA, 20 bp, Artificial Sequence
  Synthetic
guccctgcagcaggtgggga

SEQ ID NO: 1214 - DNA, 20 bp, Artificial Sequence
  Synthetic
uguccctgcagcaggugggg

SEQ ID NO: 1215 - DNA, 20 bp, Artificial Sequence
  Synthetic
cuguccctgcagcagguggg

SEQ ID NO: 1216 - DNA, 20 bp, Artificial Sequence
  Synthetic
gcuguccctgcagcaggugg

SEQ ID NO: 1217 - DNA, 20 bp, Artificial Sequence
  Synthetic
ggcugtccctgcagcaggug

SEQ ID NO: 1218 - DNA, 20 bp, Artificial Sequence
  Synthetic
gggcugtccctgcagcaggu

SEQ ID NO: 1219 - DNA, 20 bp, Artificial Sequence
  Synthetic
agggctgtccctgcagcagg

SEQ ID NO: 1220 - DNA, 20 bp, Artificial Sequence
  Synthetic
cagggctgtccctgcagcag

SEQ ID NO: 1221 - DNA, 20 bp, Artificial Sequence
  Synthetic
ucagggctgtccctgcagca

SEQ ID NO: 1222 - DNA, 20 bp, Artificial Sequence
  Synthetic
gucagggctgtccctgcagc

SEQ ID NO: 1223 - DNA, 20 bp, Artificial Sequence
  Synthetic
ugucagggctgtcccugcag

SEQ ID NO: 1224 - DNA, 20 bp, Artificial Sequence
  Synthetic
gugucagggctgtcccugca

SEQ ID NO: 1225 - DNA, 20 bp, Artificial Sequence
  Synthetic
agugucagggctgtcccugc

SEQ ID NO: 1226 - DNA, 20 bp, Artificial Sequence
  Synthetic
gagugtcagggctgtcccug

SEQ ID NO: 1227 - DNA, 20 bp, Artificial Sequence
  Synthetic
ggagugtcagggctgucccu

SEQ ID NO: 1228 - DNA, 20 bp, Artificial Sequence
  Synthetic
aggagtgtcagggctguccc

SEQ ID NO: 1229 - DNA, 20 bp, Artificial Sequence
  Synthetic
aaggagtgtcagggcugucc

SEQ ID NO: 1230 - DNA, 20 bp, Artificial Sequence
  Synthetic
aaaggagtgtcagggcuguc

SEQ ID NO: 1231 - DNA, 20 bp, Artificial Sequence
  Synthetic
gaaaggagtgtcagggcugu

SEQ ID NO: 1232 - DNA, 20 bp, Artificial Sequence
  Synthetic
ugaaaggagtgtcagggcug

SEQ ID NO: 1233 - DNA, 20 bp, Artificial Sequence
  Synthetic
cugaaaggagtgtcagggcu

SEQ ID NO: 1234 - DNA, 20 bp, Artificial Sequence
  Synthetic
ucugaaaggagtgtcagggc

SEQ ID NO: 1235 - DNA, 20 bp, Artificial Sequence
  Synthetic
gucugaaaggagtgtcaggg

SEQ ID NO: 1236 - DNA, 20 bp, Artificial Sequence
  Synthetic
ggucugaaaggagtgucagg

SEQ ID NO: 1237 - DNA, 20 bp, Artificial Sequence
  Synthetic
ggguctgaaaggagtgucag

SEQ ID NO: 1238 - DNA, 20 bp, Artificial Sequence
  Synthetic
aggguctgaaaggaguguca

SEQ ID NO: 1239 - DNA, 20 bp, Artificial Sequence
  Synthetic
gagggtctgaaaggaguguc

SEQ ID NO: 1240 - DNA, 20 bp, Artificial Sequence
  Synthetic
ugagggtctgaaaggagugu

SEQ ID NO: 1241 - DNA, 20 bp, Artificial Sequence
  Synthetic
augagggtctgaaaggagug

SEQ ID NO: 1242 - DNA, 20 bp, Artificial Sequence
  Synthetic
aaugagggtctgaaaggagu

SEQ ID NO: 1243 - DNA, 20 bp, Artificial Sequence
  Synthetic
gaaugagggtctgaaaggag

SEQ ID NO: 1244 - DNA, 20 bp, Artificial Sequence
  Synthetic
ggaaugagggtctgaaagga

SEQ ID NO: 1245 - DNA, 20 bp, Artificial Sequence
  Synthetic
aggaatgagggtctgaaagg

SEQ ID NO: 1246 - DNA, 20 bp, Artificial Sequence
  Synthetic
aaggaatgagggtctgaaag

SEQ ID NO: 1247 - DNA, 20 bp, Artificial Sequence
  Synthetic
gaaggaatgagggtcugaaa

SEQ ID NO: 1248 - DNA, 20 bp, Artificial Sequence
  Synthetic
ggaaggaatgagggtcugaa

SEQ ID NO: 1249 - DNA, 20 bp, Artificial Sequence
  Synthetic
gggaaggaatgagggucuga

SEQ ID NO: 1250 - DNA, 20 bp, Artificial Sequence
  Synthetic
ugggaaggaatgagggucug

SEQ ID NO: 1251 - DNA, 20 bp, Artificial Sequence
  Synthetic
cugggaaggaatgagggucu

SEQ ID NO: 1252 - DNA, 20 bp, Artificial Sequence
  Synthetic
ucugggaaggaatgaggguc

SEQ ID NO: 1253 - DNA, 20 bp, Artificial Sequence
  Synthetic
cucugggaaggaatgagggu

SEQ ID NO: 1254 - DNA, 20 bp, Artificial Sequence
  Synthetic
ucucugggaaggaatgaggg

SEQ ID NO: 1255 - DNA, 20 bp, Artificial Sequence
  Synthetic
aucuctgggaaggaaugagg

SEQ ID NO: 1256 - DNA, 20 bp, Artificial Sequence
  Synthetic
caucuctgggaaggaaugag

SEQ ID NO: 1257 - DNA, 20 bp, Artificial Sequence
  Synthetic
acauctctgggaaggaauga

SEQ ID NO: 1258 - DNA, 20 bp, Artificial Sequence
  Synthetic
aacauctctgggaaggaaug

SEQ ID NO: 1259 - DNA, 20 bp, Artificial Sequence
  Synthetic
caacatctctgggaaggaau

SEQ ID NO: 1260 - DNA, 20 bp, Artificial Sequence
  Synthetic
ucaacatctctgggaaggaa

SEQ ID NO: 1261 - DNA, 20 bp, Artificial Sequence
  Synthetic
cucaacatctctgggaagga

SEQ ID NO: 1262 - DNA, 20 bp, Artificial Sequence
  Synthetic
ucucaacatctctgggaagg

SEQ ID NO: 1263 - DNA, 20 bp, Artificial Sequence
  Synthetic
uucucaacatctctgggaag

SEQ ID NO: 1264 - DNA, 20 bp, Artificial Sequence
  Synthetic
auucucaacatctctgggaa

SEQ ID NO: 1265 - DNA, 20 bp, Artificial Sequence
  Synthetic
cauuctcaacatctcuggga

SEQ ID NO: 1266 - DNA, 20 bp, Artificial Sequence
  Synthetic
acauuctcaacatctcuggg

SEQ ID NO: 1267 - DNA, 20 bp, Artificial Sequence
  Synthetic
aacautctcaacatcucugg

SEQ ID NO: 1268 - DNA, 20 bp, Artificial Sequence
  Synthetic
gaacattctcaacatcucug

SEQ ID NO: 1269 - DNA, 20 bp, Artificial Sequence
  Synthetic
ugaacattctcaacaucucu

SEQ ID NO: 1270 - DNA, 20 bp, Artificial Sequence
  Synthetic
augaacattctcaacaucuc

SEQ ID NO: 1271 - DNA, 20 bp, Artificial Sequence
  Synthetic
gaugaacattctcaacaucu

SEQ ID NO: 1272 - DNA, 20 bp, Artificial Sequence
  Synthetic
agaugaacattctcaacauc

SEQ ID NO: 1273 - DNA, 20 bp, Artificial Sequence
  Synthetic
gagaugaacattctcaacau

SEQ ID NO: 1274 - DNA, 20 bp, Artificial Sequence
  Synthetic
agagatgaacattctcaaca

SEQ ID NO: 1275 - DNA, 20 bp, Artificial Sequence
  Synthetic
gagagatgaacattcucaac

SEQ ID NO: 1276 - DNA, 20 bp, Artificial Sequence
  Synthetic
ggagagatgaacattcucaa

SEQ ID NO: 1277 - DNA, 20 bp, Artificial Sequence
  Synthetic
uggagagatgaacatucuca

SEQ ID NO: 1278 - DNA, 20 bp, Artificial Sequence
  Synthetic
cuggagagatgaacauucuc

SEQ ID NO: 1279 - DNA, 20 bp, Artificial Sequence
  Synthetic
gcuggagagatgaacauucu

SEQ ID NO: 1280 - DNA, 20 bp, Artificial Sequence
  Synthetic
ggcuggagagatgaacauuc

SEQ ID NO: 1281 - DNA, 20 bp, Artificial Sequence
  Synthetic
gggcuggagagatgaacauu

SEQ ID NO: 1282 - DNA, 20 bp, Artificial Sequence
  Synthetic
ggggctggagagatgaacau

SEQ ID NO: 1283 - DNA, 20 bp, Artificial Sequence
  Synthetic
aggggctggagagatgaaca

SEQ ID NO: 1284 - DNA, 20 bp, Artificial Sequence
  Synthetic
caggggctggagagaugaac

SEQ ID NO: 1285 - DNA, 20 bp, Artificial Sequence
  Synthetic
ucaggggctggagagaugaa

SEQ ID NO: 1286 - DNA, 20 bp, Artificial Sequence
  Synthetic
gucaggggctggagagauga

SEQ ID NO: 1287 - DNA, 20 bp, Artificial Sequence
  Synthetic
ggucaggggctggagagaug

SEQ ID NO: 1288 - DNA, 20 bp, Artificial Sequence
  Synthetic
gggucaggggctggagagau

SEQ ID NO: 1289 - DNA, 20 bp, Artificial Sequence
  Synthetic
ggggucaggggctggagaga

SEQ ID NO: 1290 - DNA, 20 bp, Artificial Sequence
  Synthetic
uggggtcaggggctggagag

SEQ ID NO: 1291 - DNA, 20 bp, Artificial Sequence
  Synthetic
auggggtcaggggctggaga

SEQ ID NO: 1292 - DNA, 20 bp, Artificial Sequence
  Synthetic
cauggggtcaggggcuggag

SEQ ID NO: 1293 - DNA, 20 bp, Artificial Sequence
  Synthetic
acauggggtcaggggcugga

SEQ ID NO: 1294 - DNA, 20 bp, Artificial Sequence
  Synthetic
gacauggggtcaggggcugg

SEQ ID NO: 1295 - DNA, 20 bp, Artificial Sequence
  Synthetic
agacatggggtcaggggcug

SEQ ID NO: 1296 - DNA, 20 bp, Artificial Sequence
  Synthetic
gagacatggggtcaggggcu

SEQ ID NO: 1297 - DNA, 20 bp, Artificial Sequence
  Synthetic
ggagacatggggtcaggggc

SEQ ID NO: 1298 - DNA, 20 bp, Artificial Sequence
  Synthetic
aggagacatggggtcagggg

SEQ ID NO: 1299 - DNA, 20 bp, Artificial Sequence
  Synthetic
caggagacatggggtcaggg

SEQ ID NO: 1300 - DNA, 20 bp, Artificial Sequence
  Synthetic
ccaggagacatggggucagg

SEQ ID NO: 1301 - DNA, 20 bp, Artificial Sequence
  Synthetic
uccaggagacatggggucag

SEQ ID NO: 1302 - DNA, 20 bp, Artificial Sequence
  Synthetic
guccaggagacatgggguca

SEQ ID NO: 1303 - DNA, 20 bp, Artificial Sequence
  Synthetic
aguccaggagacatgggguc

SEQ ID NO: 1304 - DNA, 20 bp, Artificial Sequence
  Synthetic
gaguccaggagacatggggu

SEQ ID NO: 1305 - RNA, 20 nt, Artificial Sequence
  Synthetic
ugaguccaggagacaugggg

SEQ ID NO: 1306 - DNA, 20 bp, Artificial Sequence
  Synthetic
cugagtccaggagacauggg

SEQ ID NO: 1307 - DNA, 20 bp, Artificial Sequence
  Synthetic
ccugagtccaggagacaugg

SEQ ID NO: 1308 - DNA, 20 bp, Artificial Sequence
  Synthetic
cccugagtccaggagacaug

SEQ ID NO: 1309 - DNA, 20 bp, Artificial Sequence
  Synthetic
acccugagtccaggagacau

SEQ ID NO: 1310 - DNA, 20 bp, Artificial Sequence
  Synthetic
gaccctgagtccaggagaca

SEQ ID NO: 1311 - DNA, 20 bp, Artificial Sequence
  Synthetic
agaccctgagtccaggagac

SEQ ID NO: 1312 - DNA, 20 bp, Artificial Sequence
  Synthetic
cagaccctgagtccaggaga

SEQ ID NO: 1313 - DNA, 20 bp, Artificial Sequence
  Synthetic
gcagaccctgagtccaggag

SEQ ID NO: 1314 - DNA, 20 bp, Artificial Sequence
  Synthetic
agcagaccctgagtccagga

SEQ ID NO: 1315 - DNA, 20 bp, Artificial Sequence
  Synthetic
aagcagaccctgagtccagg

SEQ ID NO: 1316 - DNA, 20 bp, Artificial Sequence
  Synthetic
gaagcagaccctgaguccag

SEQ ID NO: 1317 - DNA, 20 bp, Artificial Sequence
  Synthetic
ggaagcagaccctgagucca

SEQ ID NO: 1318 - DNA, 20 bp, Artificial Sequence
  Synthetic
gggaagcagaccctgagucc

SEQ ID NO: 1319 - DNA, 20 bp, Artificial Sequence
  Synthetic
ggggaagcagaccctgaguc

SEQ ID NO: 1320 - RNA, 20 nt, Artificial Sequence
  Synthetic
gggggaagcagacccugagu

SEQ ID NO: 1321 - RNA, 20 nt, Artificial Sequence
  Synthetic
ugggggaagcagacccugag

SEQ ID NO: 1322 - RNA, 20 nt, Artificial Sequence
  Synthetic
gugggggaagcagacccuga

SEQ ID NO: 1323 - RNA, 20 nt, Artificial Sequence
  Synthetic
ugugggggaagcagacccug

SEQ ID NO: 1324 - RNA, 20 nt, Artificial Sequence
  Synthetic
augugggggaagcagacccu

SEQ ID NO: 1325 - RNA, 20 nt, Artificial Sequence
  Synthetic
aaugugggggaagcagaccc

SEQ ID NO: 1326 - DNA, 20 bp, Artificial Sequence
  Synthetic
caaugtgggggaagcagacc

SEQ ID NO: 1327 - DNA, 20 bp, Artificial Sequence
  Synthetic
ccaaugtgggggaagcagac

SEQ ID NO: 1328 - DNA, 20 bp, Artificial Sequence
  Synthetic
cccaatgtgggggaagcaga

SEQ ID NO: 1329 - DNA, 20 bp, Artificial Sequence
  Synthetic
gcccaatgtgggggaagcag

SEQ ID NO: 1330 - DNA, 20 bp, Artificial Sequence
  Synthetic
agcccaatgtgggggaagca

SEQ ID NO: 1331 - DNA, 20 bp, Artificial Sequence
  Synthetic
cagcccaatgtgggggaagc

SEQ ID NO: 1332 - DNA, 20 bp, Artificial Sequence
  Synthetic
ucagcccaatgtgggggaag

SEQ ID NO: 1333 - DNA, 20 bp, Artificial Sequence
  Synthetic
gucagcccaatgtgggggaa

SEQ ID NO: 1334 - DNA, 20 bp, Artificial Sequence
  Synthetic
ggucagcccaatgtggggga

SEQ ID NO: 1335 - DNA, 20 bp, Artificial Sequence
  Synthetic
cggucagcccaatgtggggg

SEQ ID NO: 1336 - DNA, 20 bp, Artificial Sequence
  Synthetic
acggucagcccaatgugggg

SEQ ID NO: 1337 - DNA, 20 bp, Artificial Sequence
  Synthetic
cacggtcagcccaatguggg

SEQ ID NO: 1338 - DNA, 20 bp, Artificial Sequence
  Synthetic
acacggtcagcccaaugugg

SEQ ID NO: 1339 - DNA, 20 bp, Artificial Sequence
  Synthetic
gacacggtcagcccaaugug

SEQ ID NO: 1340 - DNA, 20 bp, Artificial Sequence
  Synthetic
agacacggtcagcccaaugu

SEQ ID NO: 1341 - DNA, 20 bp, Artificial Sequence
  Synthetic
gagacacggtcagcccaaug

SEQ ID NO: 1342 - DNA, 20 bp, Artificial Sequence
  Synthetic
agagacacggtcagcccaau

SEQ ID NO: 1343 - DNA, 20 bp, Artificial Sequence
  Synthetic
gagagacacggtcagcccaa

SEQ ID NO: 1344 - DNA, 20 bp, Artificial Sequence
  Synthetic
agagagacacggtcagccca

SEQ ID NO: 1345 - DNA, 20 bp, Artificial Sequence
  Synthetic
uagagagacacggtcagccc

SEQ ID NO: 1346 - DNA, 20 bp, Artificial Sequence
  Synthetic
cuagagagacacggtcagcc

SEQ ID NO: 1347 - RNA, 20 nt, Artificial Sequence
  Synthetic
acuagagagacacggucagc

SEQ ID NO: 1348 - RNA, 20 nt, Artificial Sequence
  Synthetic
aacuagagagacacggucag

SEQ ID NO: 1349 - RNA, 20 nt, Artificial Sequence
  Synthetic
caacuagagagacacgguca

SEQ ID NO: 1350 - DNA, 20 bp, Artificial Sequence
  Synthetic
ucaactagagagacacgguc

SEQ ID NO: 1351 - DNA, 20 bp, Artificial Sequence
  Synthetic
uucaactagagagacacggu

SEQ ID NO: 1352 - DNA, 20 bp, Artificial Sequence
  Synthetic
guucaactagagagacacgg

SEQ ID NO: 1353 - DNA, 20 bp, Artificial Sequence
  Synthetic
gguucaactagagagacacg

SEQ ID NO: 1354 - DNA, 20 bp, Artificial Sequence
  Synthetic
ggguucaactagagagacac

SEQ ID NO: 1355 - DNA, 20 bp, Artificial Sequence
  Synthetic
agggutcaactagagagaca

SEQ ID NO: 1356 - DNA, 20 bp, Artificial Sequence
  Synthetic
cagggttcaactagagagac

SEQ ID NO: 1357 - DNA, 20 bp, Artificial Sequence
  Synthetic
ccagggttcaactagagaga

SEQ ID NO: 1358 - DNA, 20 bp, Artificial Sequence
  Synthetic
cccagggttcaactagagag

SEQ ID NO: 1359 - DNA, 20 bp, Artificial Sequence
  Synthetic
ucccagggttcaactagaga

SEQ ID NO: 1360 - DNA, 20 bp, Artificial Sequence
  Synthetic
uucccagggttcaacuagag

SEQ ID NO: 1361 - DNA, 20 bp, Artificial Sequence
  Synthetic
guucccagggttcaacuaga

SEQ ID NO: 1362 - DNA, 20 bp, Artificial Sequence
  Synthetic
uguucccagggttcaacuag

SEQ ID NO: 1363 - DNA, 20 bp, Artificial Sequence
  Synthetic
uuguucccagggttcaacua

SEQ ID NO: 1364 - DNA, 20 bp, Artificial Sequence
  Synthetic
auugutcccagggttcaacu

SEQ ID NO: 1365 - DNA, 20 bp, Artificial Sequence
  Synthetic
aauugttcccagggtucaac

SEQ ID NO: 1366 - DNA, 20 bp, Artificial Sequence
  Synthetic
aaauugttcccaggguucaa

SEQ ID NO: 1367 - DNA, 20 bp, Artificial Sequence
  Synthetic
gaaautgttcccaggguuca

SEQ ID NO: 1368 - DNA, 20 bp, Artificial Sequence
  Synthetic
ggaaattgttcccaggguuc

SEQ ID NO: 1369 - DNA, 20 bp, Artificial Sequence
  Synthetic
uggaaattgttcccaggguu

SEQ ID NO: 1370 - DNA, 20 bp, Artificial Sequence
  Synthetic
uuggaaattgttcccagggu

SEQ ID NO: 1371 - DNA, 20 bp, Artificial Sequence
  Synthetic
uuuggaaattgttcccaggg

SEQ ID NO: 1372 - DNA, 20 bp, Artificial Sequence
  Synthetic
uuuuggaaattgttcccagg

SEQ ID NO: 1373 - DNA, 20 bp, Artificial Sequence
  Synthetic
guuuuggaaattgttcccag

SEQ ID NO: 1374 - DNA, 20 bp, Artificial Sequence
  Synthetic
aguuutggaaattgtuccca

SEQ ID NO: 1375 - DNA, 20 bp, Artificial Sequence
  Synthetic
caguuttggaaattguuccc

SEQ ID NO: 1376 - DNA, 20 bp, Artificial Sequence
  Synthetic
acagutttggaaattguucc

SEQ ID NO: 1377 - DNA, 20 bp, Artificial Sequence
  Synthetic
gacagttttggaaatuguuc

SEQ ID NO: 1378 - DNA, 20 bp, Artificial Sequence
  Synthetic
ggacagttttggaaauuguu

SEQ ID NO: 1379 - DNA, 20 bp, Artificial Sequence
  Synthetic
uggacagttttggaaauugu

SEQ ID NO: 1380 - DNA, 20 bp, Artificial Sequence
  Synthetic
cuggacagttttggaaauug

SEQ ID NO: 1381 - DNA, 20 bp, Artificial Sequence
  Synthetic
ccuggacagttttggaaauu

SEQ ID NO: 1382 - DNA, 20 bp, Artificial Sequence
  Synthetic
cccuggacagttttggaaau

SEQ ID NO: 1383 - DNA, 20 bp, Artificial Sequence
  Synthetic
gcccuggacagttttggaaa

SEQ ID NO: 1384 - DNA, 20 bp, Artificial Sequence
  Synthetic
cgccctggacagtttuggaa

SEQ ID NO: 1385 - DNA, 20 bp, Artificial Sequence
  Synthetic
ccgccctggacagttuugga

SEQ ID NO: 1386 - DNA, 20 bp, Artificial Sequence
  Synthetic
cccgccctggacagtuuugg

SEQ ID NO: 1387 - DNA, 20 bp, Artificial Sequence
  Synthetic
ccccgccctggacaguuuug

SEQ ID NO: 1388 - DNA, 20 bp, Artificial Sequence
  Synthetic
cccccgccctggacaguuuu

SEQ ID NO: 1389 - DNA, 20 bp, Artificial Sequence
  Synthetic
acccccgccctggacaguuu

SEQ ID NO: 1390 - DNA, 20 bp, Artificial Sequence
  Synthetic
aacccccgccctggacaguu

SEQ ID NO: 1391 - DNA, 20 bp, Artificial Sequence
  Synthetic
caacccccgccctggacagu

SEQ ID NO: 1392 - DNA, 20 bp, Artificial Sequence
  Synthetic
gcaacccccgccctggacag

SEQ ID NO: 1393 - DNA, 20 bp, Artificial Sequence
  Synthetic
cgcaacccccgccctggaca

SEQ ID NO: 1394 - RNA, 20 nt, Artificial Sequence
  Synthetic
acgcaacccccgcccuggac

SEQ ID NO: 1395 - RNA, 20 nt, Artificial Sequence
  Synthetic
gacgcaacccccgcccugga

SEQ ID NO: 1396 - RNA, 20 nt, Artificial Sequence
  Synthetic
agacgcaacccccgcccugg

SEQ ID NO: 1397 - RNA, 20 nt, Artificial Sequence
  Synthetic
gagacgcaacccccgcccug

SEQ ID NO: 1398 - RNA, 20 nt, Artificial Sequence
  Synthetic
ugagacgcaacccccgcccu

SEQ ID NO: 1399 - RNA, 20 nt, Artificial Sequence
  Synthetic
uugagacgcaacccccgccc

SEQ ID NO: 1400 - RNA, 20 nt, Artificial Sequence
  Synthetic
auugagacgcaacccccgcc

SEQ ID NO: 1401 - RNA, 20 nt, Artificial Sequence
  Synthetic
gauugagacgcaacccccgc

SEQ ID NO: 1402 - RNA, 20 nt, Artificial Sequence
  Synthetic
agauugagacgcaacccccg

SEQ ID NO: 1403 - DNA, 20 bp, Artificial Sequence
  Synthetic
gagautgagacgcaaccccc

SEQ ID NO: 1404 - DNA, 20 bp, Artificial Sequence
  Synthetic
ggagattgagacgcaacccc

SEQ ID NO: 1405 - DNA, 20 bp, Artificial Sequence
  Synthetic
gggagattgagacgcaaccc

SEQ ID NO: 1406 - DNA, 20 bp, Artificial Sequence
  Synthetic
agggagattgagacgcaacc

SEQ ID NO: 1407 - DNA, 20 bp, Artificial Sequence
  Synthetic
cagggagattgagacgcaac

SEQ ID NO: 1408 - DNA, 20 bp, Artificial Sequence
  Synthetic
ccagggagattgagacgcaa

SEQ ID NO: 1409 - DNA, 20 bp, Artificial Sequence
  Synthetic
cccagggagattgagacgca

SEQ ID NO: 1410 - DNA, 20 bp, Artificial Sequence
  Synthetic
ccccagggagattgagacgc

SEQ ID NO: 1411 - DNA, 20 bp, Artificial Sequence
  Synthetic
gccccagggagattgagacg

SEQ ID NO: 1412 - DNA, 20 bp, Artificial Sequence
  Synthetic
ugccccagggagattgagac

SEQ ID NO: 1413 - DNA, 20 bp, Artificial Sequence
  Synthetic
gugccccagggagatugaga

SEQ ID NO: 1414 - RNA, 20 nt, Artificial Sequence
  Synthetic
agugccccagggagauugag

SEQ ID NO: 1415 - RNA, 20 nt, Artificial Sequence
  Synthetic
aagugccccagggagauuga

SEQ ID NO: 1416 - RNA, 20 nt, Artificial Sequence
  Synthetic
aaagugccccagggagauug

SEQ ID NO: 1417 - DNA, 20 bp, Artificial Sequence
  Synthetic
gaaagtgccccagggagauu

SEQ ID NO: 1418 - DNA, 20 bp, Artificial Sequence
  Synthetic
ugaaagtgccccagggagau

SEQ ID NO: 1419 - DNA, 20 bp, Artificial Sequence
  Synthetic
augaaagtgccccagggaga

SEQ ID NO: 1420 - DNA, 20 bp, Artificial Sequence
  Synthetic
gaugaaagtgccccagggag

SEQ ID NO: 1421 - DNA, 20 bp, Artificial Sequence
  Synthetic
ggaugaaagtgccccaggga

SEQ ID NO: 1422 - DNA, 20 bp, Artificial Sequence
  Synthetic
aggaugaaagtgccccaggg

SEQ ID NO: 1423 - DNA, 20 bp, Artificial Sequence
  Synthetic
gaggatgaaagtgccccagg

SEQ ID NO: 1424 - DNA, 20 bp, Artificial Sequence
  Synthetic
ugaggatgaaagtgccccag

SEQ ID NO: 1425 - DNA, 20 bp, Artificial Sequence
  Synthetic
uugaggatgaaagtgcccca

SEQ ID NO: 1426 - DNA, 20 bp, Artificial Sequence
  Synthetic
cuugaggatgaaagtgcccc

SEQ ID NO: 1427 - DNA, 20 bp, Artificial Sequence
  Synthetic
gcuugaggatgaaagugccc

SEQ ID NO: 1428 - DNA, 20 bp, Artificial Sequence
  Synthetic
agcuugaggatgaaagugcc

SEQ ID NO: 1429 - DNA, 20 bp, Artificial Sequence
  Synthetic
gagcutgaggatgaaagugc

SEQ ID NO: 1430 - DNA, 20 bp, Artificial Sequence
  Synthetic
ugagcttgaggatgaaagug

SEQ ID NO: 1431 - DNA, 20 bp, Artificial Sequence
  Synthetic
cugagcttgaggatgaaagu

SEQ ID NO: 1432 - DNA, 20 bp, Artificial Sequence
  Synthetic
ccugagcttgaggatgaaag

SEQ ID NO: 1433 - DNA, 20 bp, Artificial Sequence
  Synthetic
cccugagcttgaggaugaaa

SEQ ID NO: 1434 - DNA, 20 bp, Artificial Sequence
  Synthetic
gcccugagcttgaggaugaa

SEQ ID NO: 1435 - DNA, 20 bp, Artificial Sequence
  Synthetic
ggccctgagcttgaggauga

SEQ ID NO: 1436 - DNA, 20 bp, Artificial Sequence
  Synthetic
gggccctgagcttgaggaug

SEQ ID NO: 1437 - DNA, 20 bp, Artificial Sequence
  Synthetic
ugggccctgagcttgaggau

SEQ ID NO: 1438 - DNA, 20 bp, Artificial Sequence
  Synthetic
augggccctgagcttgagga

SEQ ID NO: 1439 - DNA, 20 bp, Artificial Sequence
  Synthetic
gaugggccctgagctugagg

SEQ ID NO: 1440 - DNA, 20 bp, Artificial Sequence
  Synthetic
ggaugggccctgagcuugag

SEQ ID NO: 1441 - DNA, 20 bp, Artificial Sequence
  Synthetic
gggaugggccctgagcuuga

SEQ ID NO: 1442 - DNA, 20 bp, Artificial Sequence
  Synthetic
agggatgggccctgagcuug

SEQ ID NO: 1443 - DNA, 20 bp, Artificial Sequence
  Synthetic
aagggatgggccctgagcuu

SEQ ID NO: 1444 - DNA, 20 bp, Artificial Sequence
  Synthetic
gaagggatgggccctgagcu

SEQ ID NO: 1445 - DNA, 20 bp, Artificial Sequence
  Synthetic
agaagggatgggcccugagc

SEQ ID NO: 1446 - DNA, 20 bp, Artificial Sequence
  Synthetic
gagaagggatgggcccugag

SEQ ID NO: 1447 - DNA, 20 bp, Artificial Sequence
  Synthetic
agagaagggatgggcccuga

SEQ ID NO: 1448 - DNA, 20 bp, Artificial Sequence
  Synthetic
cagagaagggatgggcccug

SEQ ID NO: 1449 - DNA, 20 bp, Artificial Sequence
  Synthetic
gcagagaagggatgggcccu

SEQ ID NO: 1450 - DNA, 20 bp, Artificial Sequence
  Synthetic
ugcagagaagggatgggccc

SEQ ID NO: 1451 - DNA, 20 bp, Artificial Sequence
  Synthetic
cugcagagaagggatgggcc

SEQ ID NO: 1452 - RNA, 20 nt, Artificial Sequence
  Synthetic
gcugcagagaagggaugggc

SEQ ID NO: 1453 - RNA, 20 nt, Artificial Sequence
  Synthetic
agcugcagagaagggauggg

SEQ ID NO: 1454 - RNA, 20 nt, Artificial Sequence
  Synthetic
gagcugcagagaagggaugg

SEQ ID NO: 1455 - DNA, 20 bp, Artificial Sequence
  Synthetic
agagctgcagagaagggaug

SEQ ID NO: 1456 - DNA, 20 bp, Artificial Sequence
  Synthetic
cagagctgcagagaagggau

SEQ ID NO: 1457 - DNA, 20 bp, Artificial Sequence
  Synthetic
ucagagctgcagagaaggga

SEQ ID NO: 1458 - DNA, 20 bp, Artificial Sequence
  Synthetic
gucagagctgcagagaaggg

SEQ ID NO: 1459 - DNA, 20 bp, Artificial Sequence
  Synthetic
ggucagagctgcagagaagg

SEQ ID NO: 1460 - DNA, 20 bp, Artificial Sequence
  Synthetic
gggucagagctgcagagaag

SEQ ID NO: 1461 - DNA, 20 bp, Artificial Sequence
  Synthetic
ugggucagagctgcagagaa

SEQ ID NO: 1462 - DNA, 20 bp, Artificial Sequence
  Synthetic
uugggtcagagctgcagaga

SEQ ID NO: 1463 - DNA, 20 bp, Artificial Sequence
  Synthetic
uuugggtcagagctgcagag

SEQ ID NO: 1464 - DNA, 20 bp, Artificial Sequence
  Synthetic
auuugggtcagagctgcaga

SEQ ID NO: 1465 - DNA, 20 bp, Artificial Sequence
  Synthetic
aauuugggtcagagcugcag

SEQ ID NO: 1466 - DNA, 20 bp, Artificial Sequence
  Synthetic
aaauutgggtcagagcugca

SEQ ID NO: 1467 - DNA, 20 bp, Artificial Sequence
  Synthetic
uaaauttgggtcagagcugc

SEQ ID NO: 1468 - DNA, 20 bp, Artificial Sequence
  Synthetic
cuaaatttgggtcagagcug

SEQ ID NO: 1469 - DNA, 20 bp, Artificial Sequence
  Synthetic
acuaaatttgggtcagagcu

SEQ ID NO: 1470 - DNA, 20 bp, Artificial Sequence
  Synthetic
gacuaaatttgggtcagagc

SEQ ID NO: 1471 - DNA, 20 bp, Artificial Sequence
  Synthetic
ggacuaaatttgggtcagag

SEQ ID NO: 1472 - DNA, 20 bp, Artificial Sequence
  Synthetic
gggactaaatttgggucaga

SEQ ID NO: 1473 - DNA, 20 bp, Artificial Sequence
  Synthetic
ugggactaaatttgggucag

SEQ ID NO: 1474 - DNA, 20 bp, Artificial Sequence
  Synthetic
cugggactaaatttggguca

SEQ ID NO: 1475 - DNA, 20 bp, Artificial Sequence
  Synthetic
ucugggactaaatttggguc

SEQ ID NO: 1476 - DNA, 20 bp, Artificial Sequence
  Synthetic
uucugggactaaattugggu

SEQ ID NO: 1477 - DNA, 20 bp, Artificial Sequence
  Synthetic
uuucugggactaaatuuggg

SEQ ID NO: 1478 - DNA, 20 bp, Artificial Sequence
  Synthetic
auuuctgggactaaauuugg

SEQ ID NO: 1479 - DNA, 20 bp, Artificial Sequence
  Synthetic
uauuuctgggactaaauuug

SEQ ID NO: 1480 - DNA, 20 bp, Artificial Sequence
  Synthetic
uuauutctgggactaaauuu

SEQ ID NO: 1481 - DNA, 20 bp, Artificial Sequence
  Synthetic
uuuauttctgggactaaauu

SEQ ID NO: 1482 - DNA, 20 bp, Artificial Sequence
  Synthetic
guuuatttctgggacuaaau

SEQ ID NO: 1483 - DNA, 20 bp, Artificial Sequence
  Synthetic
aguuuatttctgggacuaaa

SEQ ID NO: 1484 - DNA, 20 bp, Artificial Sequence
  Synthetic
caguutatttctgggacuaa

SEQ ID NO: 1485 - DNA, 20 bp, Artificial Sequence
  Synthetic
ucaguttatttctgggacua

SEQ ID NO: 1486 - DNA, 20 bp, Artificial Sequence
  Synthetic
cucagtttatttctgggacu

SEQ ID NO: 1487 - DNA, 20 bp, Artificial Sequence
  Synthetic
ucucagtttatttctgggac

SEQ ID NO: 1488 - DNA, 20 bp, Artificial Sequence
  Synthetic
uucucagtttatttcuggga

SEQ ID NO: 1489 - DNA, 20 bp, Artificial Sequence
  Synthetic
cuucucagtttatttcuggg

SEQ ID NO: 1490 - DNA, 20 bp, Artificial Sequence
  Synthetic
acuuctcagtttattucugg

SEQ ID NO: 1491 - DNA, 20 bp, Artificial Sequence
  Synthetic
cacuuctcagtttatuucug

SEQ ID NO: 1492 - DNA, 20 bp, Artificial Sequence
  Synthetic
ccacutctcagtttauuucu

SEQ ID NO: 1493 - DNA, 20 bp, Artificial Sequence
  Synthetic
uccacttctcagtttauuuc

SEQ ID NO: 1494 - DNA, 20 bp, Artificial Sequence
  Synthetic
uuccacttctcagttuauuu

SEQ ID NO: 1495 - RNA, 20 nt, Artificial Sequence
  Synthetic
cagcuagagggugggugucu

SEQ ID NO: 1496 - RNA, 20 nt, Artificial Sequence
  Synthetic
ccagcuagaggguggguguc

SEQ ID NO: 1497 - RNA, 20 nt, Artificial Sequence
  Synthetic
accagcuagagggugggugu

SEQ ID NO: 1498 - RNA, 20 nt, Artificial Sequence
  Synthetic
gaccagcuagagggugggug

SEQ ID NO: 1499 - RNA, 20 nt, Artificial Sequence
  Synthetic
agaccagcuagagggugggu

SEQ ID NO: 1500 - RNA, 20 nt, Artificial Sequence
  Synthetic
ccagaccagcuagagggugg

SEQ ID NO: 1501 - RNA, 20 nt, Artificial Sequence
  Synthetic
gccagaccagcuagagggug

SEQ ID NO: 1502 - RNA, 20 nt, Artificial Sequence
  Synthetic
ggccagaccagcuagagggu

SEQ ID NO: 1503 - RNA, 20 nt, Artificial Sequence
  Synthetic
aggccagaccagcuagaggg

SEQ ID NO: 1504 - RNA, 20 nt, Artificial Sequence
  Synthetic
gaggccagaccagcuagagg

SEQ ID NO: 1505 - RNA, 20 nt, Artificial Sequence
  Synthetic
agaggccagaccagcuagag

SEQ ID NO: 1506 - RNA, 20 nt, Artificial Sequence
  Synthetic
aagaggccagaccagcuaga

SEQ ID NO: 1507 - RNA, 20 nt, Artificial Sequence
  Synthetic
caagaggccagaccagcuag

SEQ ID NO: 1508 - RNA, 20 nt, Artificial Sequence
  Synthetic
ucaagaggccagaccagcua

SEQ ID NO: 1509 - RNA, 20 nt, Artificial Sequence
  Synthetic
cucaagaggccagaccagcu

SEQ ID NO: 1510 - RNA, 20 nt, Artificial Sequence
  Synthetic
acucaagaggccagaccagc

SEQ ID NO: 1511 - RNA, 20 nt, Artificial Sequence
  Synthetic
gacucaagaggccagaccag

SEQ ID NO: 1512 - RNA, 20 nt, Artificial Sequence
  Synthetic
agacucaagaggccagacca

SEQ ID NO: 1513 - RNA, 20 nt, Artificial Sequence
  Synthetic
cagacucaagaggccagacc

SEQ ID NO: 1514 - RNA, 20 nt, Artificial Sequence
  Synthetic
ucagacucaagaggccagac

SEQ ID NO: 1515 - RNA, 20 nt, Artificial Sequence
  Synthetic
uucagacucaagaggccaga

SEQ ID NO: 1516 - RNA, 20 nt, Artificial Sequence
  Synthetic
uuucagacucaagaggccag

SEQ ID NO: 1517 - RNA, 20 nt, Artificial Sequence
  Synthetic
guuucagacucaagaggcca

SEQ ID NO: 1518 - RNA, 20 nt, Artificial Sequence
  Synthetic
gguuucagacucaagaggcc

SEQ ID NO: 1519 - RNA, 20 nt, Artificial Sequence
  Synthetic
ggguuucagacucaagaggc

SEQ ID NO: 1520 - RNA, 20 nt, Artificial Sequence
  Synthetic
uggguuucagacucaagagg

SEQ ID NO: 1521 - RNA, 20 nt, Artificial Sequence
  Synthetic
guggguuucagacucaagag

SEQ ID NO: 1522 - RNA, 20 nt, Artificial Sequence
  Synthetic
gguggguuucagacucaaga

SEQ ID NO: 1523 - RNA, 20 nt, Artificial Sequence
  Synthetic
ggguggguuucagacucaag

SEQ ID NO: 1524 - RNA, 20 nt, Artificial Sequence
  Synthetic
gggguggguuucagacucaa

SEQ ID NO: 1525 - RNA, 20 nt, Artificial Sequence
  Synthetic
ggggguggguuucagacuca

SEQ ID NO: 1526 - RNA, 20 nt, Artificial Sequence
  Synthetic
uggggguggguuucagacuc

SEQ ID NO: 1527 - RNA, 20 nt, Artificial Sequence
  Synthetic
cuggggguggguuucagacu

SEQ ID NO: 1528 - RNA, 20 nt, Artificial Sequence
  Synthetic
gcuggggguggguuucagac

SEQ ID NO: 1529 - RNA, 20 nt, Artificial Sequence
  Synthetic
ggcuggggguggguuucaga

SEQ ID NO: 1530 - RNA, 20 nt, Artificial Sequence
  Synthetic
gggcuggggguggguuucag

SEQ ID NO: 1531 - RNA, 20 nt, Artificial Sequence
  Synthetic
ugggcuggggguggguuuca

SEQ ID NO: 1532 - RNA, 20 nt, Artificial Sequence
  Synthetic
uugggcuggggguggguuuc

SEQ ID NO: 1533 - RNA, 20 nt, Artificial Sequence
  Synthetic
cuugggcuggggguggguuu

SEQ ID NO: 1534 - RNA, 20 nt, Artificial Sequence
  Synthetic
gcuugggcuggggguggguu

SEQ ID NO: 1535 - RNA, 20 nt, Artificial Sequence
  Synthetic
ggcuugggcugggggugggu

SEQ ID NO: 1536 - RNA, 20 nt, Artificial Sequence
  Synthetic
gggcuugggcuggggguggg

SEQ ID NO: 1537 - RNA, 20 nt, Artificial Sequence
  Synthetic
ggggcuugggcugggggugg

SEQ ID NO: 1538 - RNA, 20 nt, Artificial Sequence
  Synthetic
cggggcuugggcugggggug

SEQ ID NO: 1539 - RNA, 20 nt, Artificial Sequence
  Synthetic
gcggggcuugggcugggggu

SEQ ID NO: 1540 - RNA, 20 nt, Artificial Sequence
  Synthetic
ggcggggcuugggcuggggg

SEQ ID NO: 1541 - RNA, 20 nt, Artificial Sequence
  Synthetic
aggcggggcuugggcugggg

SEQ ID NO: 1542 - RNA, 20 nt, Artificial Sequence
  Synthetic
gaggcggggcuugggcuggg

SEQ ID NO: 1543 - RNA, 20 nt, Artificial Sequence
  Synthetic
agaggcggggcuugggcugg

SEQ ID NO: 1544 - RNA, 20 nt, Artificial Sequence
  Synthetic
cagaggcggggcuugggcug

SEQ ID NO: 1545 - RNA, 20 nt, Artificial Sequence
  Synthetic
ucagaggcggggcuugggcu

SEQ ID NO: 1546 - RNA, 20 nt, Artificial Sequence
  Synthetic
cucagaggcggggcuugggc

SEQ ID NO: 1547 - RNA, 20 nt, Artificial Sequence
  Synthetic
gcucagaggcggggcuuggg

SEQ ID NO: 1548 - RNA, 20 nt, Artificial Sequence
  Synthetic
ggcucagaggcggggcuugg

SEQ ID NO: 1549 - RNA, 20 nt, Artificial Sequence
  Synthetic
gggcucagaggcggggcuug

SEQ ID NO: 1550 - RNA, 20 nt, Artificial Sequence
  Synthetic
ggggcucagaggcggggcuu

SEQ ID NO: 1551 - RNA, 20 nt, Artificial Sequence
  Synthetic
cggggcucagaggcggggcu

SEQ ID NO: 1552 - RNA, 20 nt, Artificial Sequence
  Synthetic
gcggggcucagaggcggggc

SEQ ID NO: 1553 - RNA, 20 nt, Artificial Sequence
  Synthetic
ggcggggcucagaggcgggg

SEQ ID NO: 1554 - RNA, 20 nt, Artificial Sequence
  Synthetic
gggcggggcucagaggcggg

SEQ ID NO: 1555 - RNA, 20 nt, Artificial Sequence
  Synthetic
ugggcggggcucagaggcgg

SEQ ID NO: 1556 - RNA, 20 nt, Artificial Sequence
  Synthetic
uugggcggggcucagaggcg

SEQ ID NO: 1557 - RNA, 20 nt, Artificial Sequence
  Synthetic
guugggcggggcucagaggc

SEQ ID NO: 1558 - RNA, 20 nt, Artificial Sequence
  Synthetic
gguugggcggggcucagagg

SEQ ID NO: 1559 - RNA, 20 nt, Artificial Sequence
  Synthetic
ggguugggcggggcucagag

SEQ ID NO: 1560 - RNA, 20 nt, Artificial Sequence
  Synthetic
uggguugggcggggcucaga

SEQ ID NO: 1561 - RNA, 20 nt, Artificial Sequence
  Synthetic
auggguugggcggggcucag

SEQ ID NO: 1562 - RNA, 20 nt, Artificial Sequence
  Synthetic
aauggguugggcggggcuca

SEQ ID NO: 1563 - RNA, 20 nt, Artificial Sequence
  Synthetic
aaauggguugggcggggcuc

SEQ ID NO: 1564 - RNA, 20 nt, Artificial Sequence
  Synthetic
aaaauggguugggcggggcu

SEQ ID NO: 1565 - RNA, 20 nt, Artificial Sequence
  Synthetic
gaaaauggguugggcggggc

SEQ ID NO: 1566 - RNA, 20 nt, Artificial Sequence
  Synthetic
ggaaaauggguugggcgggg

SEQ ID NO: 1567 - RNA, 20 nt, Artificial Sequence
  Synthetic
cggaaaauggguugggcggg

SEQ ID NO: 1568 - RNA, 20 nt, Artificial Sequence
  Synthetic
acggaaaauggguugggcgg

SEQ ID NO: 1569 - RNA, 20 nt, Artificial Sequence
  Synthetic
aacggaaaauggguugggcg

SEQ ID NO: 1570 - RNA, 20 nt, Artificial Sequence
  Synthetic
gaacggaaaauggguugggc

SEQ ID NO: 1571 - RNA, 20 nt, Artificial Sequence
  Synthetic
ggaacggaaaauggguuggg

SEQ ID NO: 1572 - RNA, 20 nt, Artificial Sequence
  Synthetic
gggaacggaaaauggguugg

SEQ ID NO: 1573 - RNA, 20 nt, Artificial Sequence
  Synthetic
ugggaacggaaaauggguug

SEQ ID NO: 1574 - RNA, 20 nt, Artificial Sequence
  Synthetic
cugggaacggaaaauggguu

SEQ ID NO: 1575 - RNA, 20 nt, Artificial Sequence
  Synthetic
ucugggaacggaaaaugggu

SEQ ID NO: 1576 - RNA, 20 nt, Artificial Sequence
  Synthetic
cucugggaacggaaaauggg

SEQ ID NO: 1577 - RNA, 20 nt, Artificial Sequence
  Synthetic
gcucugggaacggaaaaugg

SEQ ID NO: 1578 - RNA, 20 nt, Artificial Sequence
  Synthetic
ugcucugggaacggaaaaug

SEQ ID NO: 1579 - RNA, 20 nt, Artificial Sequence
  Synthetic
augcucugggaacggaaaau

SEQ ID NO: 1580 - RNA, 20 nt, Artificial Sequence
  Synthetic
caugcucugggaacggaaaa

SEQ ID NO: 1581 - RNA, 20 nt, Artificial Sequence
  Synthetic
acaugcucugggaacggaaa

SEQ ID NO: 1582 - RNA, 20 nt, Artificial Sequence
  Synthetic
aacaugcucugggaacggaa

SEQ ID NO: 1583 - RNA, 20 nt, Artificial Sequence
  Synthetic
gaacaugcucugggaacgga

SEQ ID NO: 1584 - RNA, 20 nt, Artificial Sequence
  Synthetic
agaacaugcucugggaacgg

SEQ ID NO: 1585 - RNA, 20 nt, Artificial Sequence
  Synthetic
gagaacaugcucugggaacg

SEQ ID NO: 1586 - RNA, 20 nt, Artificial Sequence
  Synthetic
cgagaacaugcucugggaac

SEQ ID NO: 1587 - RNA, 20 nt, Artificial Sequence
  Synthetic
gcgagaacaugcucugggaa

SEQ ID NO: 1588 - RNA, 20 nt, Artificial Sequence
  Synthetic
ggcgagaacaugcucuggga

SEQ ID NO: 1589 - RNA, 20 nt, Artificial Sequence
  Synthetic
uggcgagaacaugcucuggg

SEQ ID NO: 1590 - RNA, 20 nt, Artificial Sequence
  Synthetic
uuggcgagaacaugcucugg

SEQ ID NO: 1591 - RNA, 20 nt, Artificial Sequence
  Synthetic
guuggcgagaacaugcucug

SEQ ID NO: 1592 - RNA, 20 nt, Artificial Sequence
  Synthetic
uguuggcgagaacaugcucu

SEQ ID NO: 1593 - RNA, 20 nt, Artificial Sequence
  Synthetic
auuguuggcgagaacaugcu

SEQ ID NO: 1594 - RNA, 20 nt, Artificial Sequence
  Synthetic
cauuguuggcgagaacaugc

SEQ ID NO: 1595 - RNA, 20 nt, Artificial Sequence
  Synthetic
ucauuguuggcgagaacaug

SEQ ID NO: 1596 - RNA, 20 nt, Artificial Sequence
  Synthetic
aucauuguuggcgagaacau

SEQ ID NO: 1597 - RNA, 20 nt, Artificial Sequence
  Synthetic
caucauuguuggcgagaaca

SEQ ID NO: 1598 - RNA, 20 nt, Artificial Sequence
  Synthetic
acaucauuguuggcgagaac

SEQ ID NO: 1599 - RNA, 20 nt, Artificial Sequence
  Synthetic
aacaucauuguuggcgagaa

SEQ ID NO: 1600 - RNA, 20 nt, Artificial Sequence
  Synthetic
aaacaucauuguuggcgaga

SEQ ID NO: 1601 - RNA, 20 nt, Artificial Sequence
  Synthetic
gaaacaucauuguuggcgag

SEQ ID NO: 1602 - RNA, 20 nt, Artificial Sequence
  Synthetic
ggaaacaucauuguuggcga

SEQ ID NO: 1603 - RNA, 20 nt, Artificial Sequence
  Synthetic
aggaaacaucauuguuggcg

SEQ ID NO: 1604 - RNA, 20 nt, Artificial Sequence
  Synthetic
caggaaacaucauuguuggc

SEQ ID NO: 1605 - RNA, 20 nt, Artificial Sequence
  Synthetic
acaggaaacaucauuguugg

SEQ ID NO: 1606 - RNA, 20 nt, Artificial Sequence
  Synthetic
cacaggaaacaucauuguug

SEQ ID NO: 1607 - RNA, 20 nt, Artificial Sequence
  Synthetic
ucacaggaaacaucauuguu

SEQ ID NO: 1608 - RNA, 20 nt, Artificial Sequence
  Synthetic
gucacaggaaacaucauugu

SEQ ID NO: 1609 - RNA, 20 nt, Artificial Sequence
  Synthetic
ggucacaggaaacaucauug

SEQ ID NO: 1610 - RNA, 20 nt, Artificial Sequence
  Synthetic
gguggucacaggaaacauca

SEQ ID NO: 1611 - RNA, 20 nt, Artificial Sequence
  Synthetic
ggguggucacaggaaacauc

SEQ ID NO: 1612 - RNA, 20 nt, Artificial Sequence
  Synthetic
gggguggucacaggaaacau

SEQ ID NO: 1613 - RNA, 20 nt, Artificial Sequence
  Synthetic
agggguggucacaggaaaca

SEQ ID NO: 1614 - RNA, 20 nt, Artificial Sequence
  Synthetic
gagggguggucacaggaaac

SEQ ID NO: 1615 - RNA, 20 nt, Artificial Sequence
  Synthetic
agagggguggucacaggaaa

SEQ ID NO: 1616 - RNA, 20 nt, Artificial Sequence
  Synthetic
uagagggguggucacaggaa

SEQ ID NO: 1617 - RNA, 20 nt, Artificial Sequence
  Synthetic
uuagagggguggucacagga

SEQ ID NO: 1618 - RNA, 20 nt, Artificial Sequence
  Synthetic
guuagagggguggucacagg

SEQ ID NO: 1619 - RNA, 20 nt, Artificial Sequence
  Synthetic
uguuagagggguggucacag

SEQ ID NO: 1620 - RNA, 20 nt, Artificial Sequence
  Synthetic
guguuagagggguggucaca

SEQ ID NO: 1621 - RNA, 20 nt, Artificial Sequence
  Synthetic
gguguuagagggguggucac

SEQ ID NO: 1622 - RNA, 20 nt, Artificial Sequence
  Synthetic
cgguguuagaggggugguca

SEQ ID NO: 1623 - RNA, 20 nt, Artificial Sequence
  Synthetic
acgguguuagaggggugguc

SEQ ID NO: 1624 - RNA, 20 nt, Artificial Sequence
  Synthetic
cacgguguuagagggguggu

SEQ ID NO: 1625 - RNA, 20 nt, Artificial Sequence
  Synthetic
gcacgguguuagaggggugg

SEQ ID NO: 1626 - RNA, 20 nt, Artificial Sequence
  Synthetic
ggcacgguguuagaggggug

SEQ ID NO: 1627 - RNA, 20 nt, Artificial Sequence
  Synthetic
gggcacgguguuagaggggu

SEQ ID NO: 1628 - RNA, 20 nt, Artificial Sequence
  Synthetic
agggcacgguguuagagggg

SEQ ID NO: 1629 - RNA, 20 nt, Artificial Sequence
  Synthetic
gagggcacgguguuagaggg

SEQ ID NO: 1630 - RNA, 20 nt, Artificial Sequence
  Synthetic
agagggcacgguguuagagg

SEQ ID NO: 1631 - RNA, 20 nt, Artificial Sequence
  Synthetic
cagagggcacgguguuagag

SEQ ID NO: 1632 - RNA, 20 nt, Artificial Sequence
  Synthetic
ccagagggcacgguguuaga

SEQ ID NO: 1633 - RNA, 20 nt, Artificial Sequence
  Synthetic
cccagagggcacgguguuag

SEQ ID NO: 1634 - RNA, 20 nt, Artificial Sequence
  Synthetic
guugcucccagagggcacgg

SEQ ID NO: 1635 - RNA, 20 nt, Artificial Sequence
  Synthetic
gguugcucccagagggcacg

SEQ ID NO: 1636 - RNA, 20 nt, Artificial Sequence
  Synthetic
ugguugcucccagagggcac

SEQ ID NO: 1637 - RNA, 20 nt, Artificial Sequence
  Synthetic
cugguugcucccagagggca

SEQ ID NO: 1638 - RNA, 20 nt, Artificial Sequence
  Synthetic
ccugguugcucccagagggc

SEQ ID NO: 1639 - RNA, 20 nt, Artificial Sequence
  Synthetic
uccugguugcucccagaggg

SEQ ID NO: 1640 - RNA, 20 nt, Artificial Sequence
  Synthetic
guccugguugcucccagagg

SEQ ID NO: 1641 - RNA, 20 nt, Artificial Sequence
  Synthetic
gguccugguugcucccagag

SEQ ID NO: 1642 - RNA, 20 nt, Artificial Sequence
  Synthetic
agguccugguugcucccaga

SEQ ID NO: 1643 - RNA, 20 nt, Artificial Sequence
  Synthetic
cagguccugguugcucccag

SEQ ID NO: 1644 - RNA, 20 nt, Artificial Sequence
  Synthetic
ccagguccugguugcuccca

SEQ ID NO: 1645 - RNA, 20 nt, Artificial Sequence
  Synthetic
cccagguccugguugcuccc

SEQ ID NO: 1646 - RNA, 20 nt, Artificial Sequence
  Synthetic
ucccagguccugguugcucc

SEQ ID NO: 1647 - RNA, 20 nt, Artificial Sequence
  Synthetic
cucccagguccugguugcuc

SEQ ID NO: 1648 - RNA, 20 nt, Artificial Sequence
  Synthetic
gcucccagguccugguugcu

SEQ ID NO: 1649 - RNA, 20 nt, Artificial Sequence
  Synthetic
agcucccagguccugguugc

SEQ ID NO: 1650 - RNA, 20 nt, Artificial Sequence
  Synthetic
cagcucccagguccugguug

SEQ ID NO: 1651 - RNA, 20 nt, Artificial Sequence
  Synthetic
ccagcucccagguccugguu

SEQ ID NO: 1652 - RNA, 20 nt, Artificial Sequence
  Synthetic
cccagcucccagguccuggu

SEQ ID NO: 1653 - RNA, 20 nt, Artificial Sequence
  Synthetic
ccccagcucccagguccugg

SEQ ID NO: 1654 - RNA, 20 nt, Artificial Sequence
  Synthetic
gccccagcucccagguccug

SEQ ID NO: 1655 - RNA, 20 nt, Artificial Sequence
  Synthetic
ggccccagcucccagguccu

SEQ ID NO: 1656 - RNA, 20 nt, Artificial Sequence
  Synthetic
cggccccagcucccaggucc

SEQ ID NO: 1657 - RNA, 20 nt, Artificial Sequence
  Synthetic
ccggccccagcucccagguc

SEQ ID NO: 1658 - RNA, 20 nt, Artificial Sequence
  Synthetic
cccggccccagcucccaggu

SEQ ID NO: 1659 - RNA, 20 nt, Artificial Sequence
  Synthetic
ccccggccccagcucccagg

SEQ ID NO: 1660 - RNA, 20 nt, Artificial Sequence
  Synthetic
uccccggccccagcucccag

SEQ ID NO: 1661 - RNA, 20 nt, Artificial Sequence
  Synthetic
cgucuuccccggccccagcu

SEQ ID NO: 1662 - RNA, 20 nt, Artificial Sequence
  Synthetic
gcgucuuccccggccccagc

SEQ ID NO: 1663 - RNA, 20 nt, Artificial Sequence
  Synthetic
ggcgucuuccccggccccag

SEQ ID NO: 1664 - RNA, 20 nt, Artificial Sequence
  Synthetic
gggcgucuuccccggcccca

SEQ ID NO: 1665 - RNA, 20 nt, Artificial Sequence
  Synthetic
cgggcgucuuccccggcccc

SEQ ID NO: 1666 - RNA, 20 nt, Artificial Sequence
  Synthetic
ccgggcgucuuccccggccc

SEQ ID NO: 1667 - RNA, 20 nt, Artificial Sequence
  Synthetic
accgggcgucuuccccggcc

SEQ ID NO: 1668 - RNA, 20 nt, Artificial Sequence
  Synthetic
gaccgggcgucuuccccggc

SEQ ID NO: 1669 - RNA, 20 nt, Artificial Sequence
  Synthetic
cgaccgggcgucuuccccgg

SEQ ID NO: 1670 - RNA, 20 nt, Artificial Sequence
  Synthetic
ccgaccgggcgucuuccccg

SEQ ID NO: 1671 - RNA, 20 nt, Artificial Sequence
  Synthetic
uccgaccgggcgucuucccc

SEQ ID NO: 1672 - RNA, 20 nt, Artificial Sequence
  Synthetic
auccgaccgggcgucuuccc

SEQ ID NO: 1673 - RNA, 20 nt, Artificial Sequence
  Synthetic
cauccgaccgggcgucuucc

SEQ ID NO: 1674 - RNA, 20 nt, Artificial Sequence
  Synthetic
ugucauccgaccgggcgucu

SEQ ID NO: 1675 - RNA, 20 nt, Artificial Sequence
  Synthetic
cugucauccgaccgggcguc

SEQ ID NO: 1676 - RNA, 20 nt, Artificial Sequence
  Synthetic
gcugucauccgaccgggcgu

SEQ ID NO: 1677 - RNA, 20 nt, Artificial Sequence
  Synthetic
ugcugucauccgaccgggcg

SEQ ID NO: 1678 - RNA, 20 nt, Artificial Sequence
  Synthetic
cugcugucauccgaccgggc

SEQ ID NO: 1679 - RNA, 20 nt, Artificial Sequence
  Synthetic
gcugcugucauccgaccggg

SEQ ID NO: 1680 - RNA, 20 nt, Artificial Sequence
  Synthetic
ugcugcugucauccgaccgg

SEQ ID NO: 1681 - RNA, 20 nt, Artificial Sequence
  Synthetic
cugcugcugucauccgaccg

SEQ ID NO: 1682 - RNA, 20 nt, Artificial Sequence
  Synthetic
gcugcugcugucauccgacc

SEQ ID NO: 1683 - RNA, 20 nt, Artificial Sequence
  Synthetic
ggcugcugcugucauccgac

SEQ ID NO: 1684 - RNA, 20 nt, Artificial Sequence
  Synthetic
cggcugcugcugucauccga

SEQ ID NO: 1685 - RNA, 20 nt, Artificial Sequence
  Synthetic
gcggcugcugcugucauccg

SEQ ID NO: 1686 - RNA, 20 nt, Artificial Sequence
  Synthetic
ugcggcugcugcugucaucc

SEQ ID NO: 1687 - RNA, 20 nt, Artificial Sequence
  Synthetic
augcggcugcugcugucauc

SEQ ID NO: 1688 - RNA, 20 nt, Artificial Sequence
  Synthetic
gaugcggcugcugcugucau

SEQ ID NO: 1689 - RNA, 20 nt, Artificial Sequence
  Synthetic
ugaugcggcugcugcuguca

SEQ ID NO: 1690 - RNA, 20 nt, Artificial Sequence
  Synthetic
augaugcggcugcugcuguc

SEQ ID NO: 1691 - RNA, 20 nt, Artificial Sequence
  Synthetic
gaugaugcggcugcugcugu

SEQ ID NO: 1692 - RNA, 20 nt, Artificial Sequence
  Synthetic
ugaugaugcggcugcugcug

SEQ ID NO: 1693 - RNA, 20 nt, Artificial Sequence
  Synthetic
uugaugaugcggcugcugcu

SEQ ID NO: 1694 - RNA, 20 nt, Artificial Sequence
  Synthetic
auugaugaugcggcugcugc

SEQ ID NO: 1695 - RNA, 20 nt, Artificial Sequence
  Synthetic
cauugaugaugcggcugcug

SEQ ID NO: 1696 - RNA, 20 nt, Artificial Sequence
  Synthetic
ccauugaugaugcggcugcu

SEQ ID NO: 1697 - RNA, 20 nt, Artificial Sequence
  Synthetic
uccauugaugaugcggcugc

SEQ ID NO: 1698 - RNA, 20 nt, Artificial Sequence
  Synthetic
auccauugaugaugcggcug

SEQ ID NO: 1699 - RNA, 20 nt, Artificial Sequence
  Synthetic
gauccauugaugaugcggcu

SEQ ID NO: 1700 - RNA, 20 nt, Artificial Sequence
  Synthetic
ggauccauugaugaugcggc

SEQ ID NO: 1701 - RNA, 20 nt, Artificial Sequence
  Synthetic
cggauccauugaugaugcgg

SEQ ID NO: 1702 - RNA, 20 nt, Artificial Sequence
  Synthetic
ucggauccauugaugaugcg

SEQ ID NO: 1703 - RNA, 20 nt, Artificial Sequence
  Synthetic
gucggauccauugaugaugc

SEQ ID NO: 1704 - RNA, 20 nt, Artificial Sequence
  Synthetic
agucggauccauugaugaug

SEQ ID NO: 1705 - RNA, 20 nt, Artificial Sequence
  Synthetic
cagucggauccauugaugau

SEQ ID NO: 1706 - RNA, 20 nt, Artificial Sequence
  Synthetic
gcagucggauccauugauga

SEQ ID NO: 1707 - RNA, 20 nt, Artificial Sequence
  Synthetic
cgcagucggauccauugaug

SEQ ID NO: 1708 - RNA, 20 nt, Artificial Sequence
  Synthetic
ucgcagucggauccauugau

SEQ ID NO: 1709 - RNA, 20 nt, Artificial Sequence
  Synthetic
aucgcagucggauccauuga

SEQ ID NO: 1710 - RNA, 20 nt, Artificial Sequence
  Synthetic
uaucgcagucggauccauug

SEQ ID NO: 1711 - RNA, 20 nt, Artificial Sequence
  Synthetic
auaucgcagucggauccauu

SEQ ID NO: 1712 - RNA, 20 nt, Artificial Sequence
  Synthetic
cauaucgcagucggauccau

SEQ ID NO: 1713 - RNA, 20 nt, Artificial Sequence
  Synthetic
gcauaucgcagucggaucca

SEQ ID NO: 1714 - RNA, 20 nt, Artificial Sequence
  Synthetic
ugcauaucgcagucggaucc

SEQ ID NO: 1715 - RNA, 20 nt, Artificial Sequence
  Synthetic
gugcauaucgcagucggauc

SEQ ID NO: 1716 - RNA, 20 nt, Artificial Sequence
  Synthetic
ugugcauaucgcagucggau

SEQ ID NO: 1717 - RNA, 20 nt, Artificial Sequence
  Synthetic
gugugcauaucgcagucgga

SEQ ID NO: 1718 - RNA, 20 nt, Artificial Sequence
  Synthetic
ggugugcauaucgcagucgg

SEQ ID NO: 1719 - RNA, 20 nt, Artificial Sequence
  Synthetic
gggugugcauaucgcagucg

SEQ ID NO: 1720 - RNA, 20 nt, Artificial Sequence
  Synthetic
ugggugugcauaucgcaguc

SEQ ID NO: 1721 - RNA, 20 nt, Artificial Sequence
  Synthetic
cugggugugcauaucgcagu

SEQ ID NO: 1722 - RNA, 20 nt, Artificial Sequence
  Synthetic
gcugggugugcauaucgcag

SEQ ID NO: 1723 - RNA, 20 nt, Artificial Sequence
  Synthetic
ggcugggugugcauaucgca

SEQ ID NO: 1724 - RNA, 20 nt, Artificial Sequence
  Synthetic
cggcugggugugcauaucgc

SEQ ID NO: 1725 - RNA, 20 nt, Artificial Sequence
  Synthetic
acggcugggugugcauaucg

SEQ ID NO: 1726 - RNA, 20 nt, Artificial Sequence
  Synthetic
cacggcugggugugcauauc

SEQ ID NO: 1727 - RNA, 20 nt, Artificial Sequence
  Synthetic
ccacggcugggugugcauau

SEQ ID NO: 1728 - RNA, 20 nt, Artificial Sequence
  Synthetic
gccacggcugggugugcaua

SEQ ID NO: 1729 - RNA, 20 nt, Artificial Sequence
  Synthetic
ugccacggcugggugugcau

SEQ ID NO: 1730 - RNA, 20 nt, Artificial Sequence
  Synthetic
cugccacggcugggugugca

SEQ ID NO: 1731 - RNA, 20 nt, Artificial Sequence
  Synthetic
ccugccacggcugggugugc

SEQ ID NO: 1732 - RNA, 20 nt, Artificial Sequence
  Synthetic
gccugccacggcugggugug

SEQ ID NO: 1733 - RNA, 20 nt, Artificial Sequence
  Synthetic
ggccugccacggcugggugu

SEQ ID NO: 1734 - RNA, 20 nt, Artificial Sequence
  Synthetic
cggccugccacggcugggug

SEQ ID NO: 1735 - RNA, 20 nt, Artificial Sequence
  Synthetic
gcggccugccacggcugggu

SEQ ID NO: 1736 - RNA, 20 nt, Artificial Sequence
  Synthetic
cgcggccugccacggcuggg

SEQ ID NO: 1737 - RNA, 20 nt, Artificial Sequence
  Synthetic
gcgcggccugccacggcugg

SEQ ID NO: 1738 - RNA, 20 nt, Artificial Sequence
  Synthetic
agcgcggccugccacggcug

SEQ ID NO: 1739 - RNA, 20 nt, Artificial Sequence
  Synthetic
cagcgcggccugccacggcu

SEQ ID NO: 1740 - RNA, 20 nt, Artificial Sequence
  Synthetic
acagcgcggccugccacggc

SEQ ID NO: 1741 - RNA, 20 nt, Artificial Sequence
  Synthetic
aacagcgcggccugccacgg

SEQ ID NO: 1742 - RNA, 20 nt, Artificial Sequence
  Synthetic
caacagcgcggccugccacg

SEQ ID NO: 1743 - RNA, 20 nt, Artificial Sequence
  Synthetic
gcaacagcgcggccugccac

SEQ ID NO: 1744 - RNA, 20 nt, Artificial Sequence
  Synthetic
ggccuuagcaacagcgcggc

SEQ ID NO: 1745 - RNA, 20 nt, Artificial Sequence
  Synthetic
gggccuuagcaacagcgcgg

SEQ ID NO: 1746 - RNA, 20 nt, Artificial Sequence
  Synthetic
ugggccuuagcaacagcgcg

SEQ ID NO: 1747 - RNA, 20 nt, Artificial Sequence
  Synthetic
uugggccuuagcaacagcgc

SEQ ID NO: 1748 - RNA, 20 nt, Artificial Sequence
  Synthetic
guugggccuuagcaacagcg

SEQ ID NO: 1749 - RNA, 20 nt, Artificial Sequence
  Synthetic
gguugggccuuagcaacagc

SEQ ID NO: 1750 - RNA, 20 nt, Artificial Sequence
  Synthetic
ugguugggccuuagcaacag

SEQ ID NO: 1751 - RNA, 20 nt, Artificial Sequence
  Synthetic
cugguugggccuuagcaaca

SEQ ID NO: 1752 - RNA, 20 nt, Artificial Sequence
  Synthetic
gcugguugggccuuagcaac

SEQ ID NO: 1753 - RNA, 20 nt, Artificial Sequence
  Synthetic
agcugguugggccuuagcaa

SEQ ID NO: 1754 - RNA, 20 nt, Artificial Sequence
  Synthetic
gagcugguugggccuuagca

SEQ ID NO: 1755 - RNA, 20 nt, Artificial Sequence
  Synthetic
agagcugguugggccuuagc

SEQ ID NO: 1756 - RNA, 20 nt, Artificial Sequence
  Synthetic
uagagcugguugggccuuag

SEQ ID NO: 1757 - RNA, 20 nt, Artificial Sequence
  Synthetic
guagagcugguugggccuua

SEQ ID NO: 1758 - RNA, 20 nt, Artificial Sequence
  Synthetic
aguagagcugguugggccuu

SEQ ID NO: 1759 - RNA, 20 nt, Artificial Sequence
  Synthetic
caguagagcugguugggccu

SEQ ID NO: 1760 - RNA, 20 nt, Artificial Sequence
  Synthetic
gcaguagagcugguugggcc

SEQ ID NO: 1761 - RNA, 20 nt, Artificial Sequence
  Synthetic
cgcaguagagcugguugggc

SEQ ID NO: 1762 - RNA, 20 nt, Artificial Sequence
  Synthetic
ccgcaguagagcugguuggg

SEQ ID NO: 1763 - RNA, 20 nt, Artificial Sequence
  Synthetic
cccgcaguagagcugguugg

SEQ ID NO: 1764 - RNA, 20 nt, Artificial Sequence
  Synthetic
ccccgcaguagagcugguug

SEQ ID NO: 1765 - RNA, 20 nt, Artificial Sequence
  Synthetic
gccccgcaguagagcugguu

SEQ ID NO: 1766 - RNA, 20 nt, Artificial Sequence
  Synthetic
cgccccgcaguagagcuggu

SEQ ID NO: 1767 - RNA, 20 nt, Artificial Sequence
  Synthetic
ccgccccgcaguagagcugg

SEQ ID NO: 1768 - RNA, 20 nt, Artificial Sequence
  Synthetic
accgccccgcaguagagcug

SEQ ID NO: 1769 - RNA, 20 nt, Artificial Sequence
  Synthetic
caccgccccgcaguagagcu

SEQ ID NO: 1770 - RNA, 20 nt, Artificial Sequence
  Synthetic
acaccgccccgcaguagagc

SEQ ID NO: 1771 - RNA, 20 nt, Artificial Sequence
  Synthetic
guggaugcaccaacaccgcc

SEQ ID NO: 1772 - RNA, 20 nt, Artificial Sequence
  Synthetic
uguggaugcaccaacaccgc

SEQ ID NO: 1773 - RNA, 20 nt, Artificial Sequence
  Synthetic
cuguggaugcaccaacaccg

SEQ ID NO: 1774 - RNA, 20 nt, Artificial Sequence
  Synthetic
acuguggaugcaccaacacc

SEQ ID NO: 1775 - RNA, 20 nt, Artificial Sequence
  Synthetic
cacuguggaugcaccaacac

SEQ ID NO: 1776 - RNA, 20 nt, Artificial Sequence
  Synthetic
ccacuguggaugcaccaaca

SEQ ID NO: 1777 - RNA, 20 nt, Artificial Sequence
  Synthetic
gccacuguggaugcaccaac

SEQ ID NO: 1778 - RNA, 20 nt, Artificial Sequence
  Synthetic
agccacuguggaugcaccaa

SEQ ID NO: 1779 - RNA, 20 nt, Artificial Sequence
  Synthetic
cagccacuguggaugcacca

SEQ ID NO: 1780 - RNA, 20 nt, Artificial Sequence
  Synthetic
gcagccacuguggaugcacc

SEQ ID NO: 1781 - RNA, 20 nt, Artificial Sequence
  Synthetic
agcagccacuguggaugcac

SEQ ID NO: 1782 - RNA, 20 nt, Artificial Sequence
  Synthetic
gagcagccacuguggaugca

SEQ ID NO: 1783 - RNA, 20 nt, Artificial Sequence
  Synthetic
ugagcagccacuguggaugc

SEQ ID NO: 1784 - RNA, 20 nt, Artificial Sequence
  Synthetic
gugagcagccacuguggaug

SEQ ID NO: 1785 - RNA, 20 nt, Artificial Sequence
  Synthetic
cgugagcagccacuguggau

SEQ ID NO: 1786 - RNA, 20 nt, Artificial Sequence
  Synthetic
ccgugagcagccacugugga

SEQ ID NO: 1787 - RNA, 20 nt, Artificial Sequence
  Synthetic
ggccgugagcagccacugug

SEQ ID NO: 1788 - RNA, 20 nt, Artificial Sequence
  Synthetic
cggccgugagcagccacugu

SEQ ID NO: 1789 - RNA, 20 nt, Artificial Sequence
  Synthetic
gcggccgugagcagccacug

SEQ ID NO: 1790 - RNA, 20 nt, Artificial Sequence
  Synthetic
ggcggccgugagcagccacu

SEQ ID NO: 1791 - RNA, 20 nt, Artificial Sequence
  Synthetic
gggcggccgugagcagccac

SEQ ID NO: 1792 - RNA, 20 nt, Artificial Sequence
  Synthetic
ugggcggccgugagcagcca

SEQ ID NO: 1793 - RNA, 20 nt, Artificial Sequence
  Synthetic
gugggcggccgugagcagcc

SEQ ID NO: 1794 - RNA, 20 nt, Artificial Sequence
  Synthetic
agugggcggccgugagcagc

SEQ ID NO: 1795 - RNA, 20 nt, Artificial Sequence
  Synthetic
cagugggcggccgugagcag

SEQ ID NO: 1796 - RNA, 20 nt, Artificial Sequence
  Synthetic
gcagugggcggccgugagca

SEQ ID NO: 1797 - RNA, 20 nt, Artificial Sequence
  Synthetic
ugcagugggcggccgugagc

SEQ ID NO: 1798 - RNA, 20 nt, Artificial Sequence
  Synthetic
cugcagugggcggccgugag

SEQ ID NO: 1799 - RNA, 20 nt, Artificial Sequence
  Synthetic
ccugcagugggcggccguga

SEQ ID NO: 1800 - RNA, 20 nt, Artificial Sequence
  Synthetic
uccugcagugggcggccgug

SEQ ID NO: 1801 - RNA, 20 nt, Artificial Sequence
  Synthetic
uuccugcagugggcggccgu

SEQ ID NO: 1802 - RNA, 20 nt, Artificial Sequence
  Synthetic
cuuccugcagugggcggccg

SEQ ID NO: 1803 - RNA, 20 nt, Artificial Sequence
  Synthetic
ucuuccugcagugggcggcc

SEQ ID NO: 1804 - RNA, 20 nt, Artificial Sequence
  Synthetic
uucuuccugcagugggcggc

SEQ ID NO: 1805 - RNA, 20 nt, Artificial Sequence
  Synthetic
cuucuuccugcagugggcgg

SEQ ID NO: 1806 - RNA, 20 nt, Artificial Sequence
  Synthetic
acuucuuccugcagugggcg

SEQ ID NO: 1807 - RNA, 20 nt, Artificial Sequence
  Synthetic
cacuucuuccugcagugggc

SEQ ID NO: 1808 - RNA, 20 nt, Artificial Sequence
  Synthetic
ucacuucuuccugcaguggg

SEQ ID NO: 1809 - RNA, 20 nt, Artificial Sequence
  Synthetic
cucacuucuuccugcagugg

SEQ ID NO: 1810 - RNA, 20 nt, Artificial Sequence
  Synthetic
acucacuucuuccugcagug

SEQ ID NO: 1811 - RNA, 20 nt, Artificial Sequence
  Synthetic
cacucacuucuuccugcagu

SEQ ID NO: 1812 - RNA, 20 nt, Artificial Sequence
  Synthetic
ccacucacuucuuccugcag

SEQ ID NO: 1813 - RNA, 20 nt, Artificial Sequence
  Synthetic
cccacucacuucuuccugca

SEQ ID NO: 1814 - RNA, 20 nt, Artificial Sequence
  Synthetic
ucccacucacuucuuccugc

SEQ ID NO: 1815 - RNA, 20 nt, Artificial Sequence
  Synthetic
cucccacucacuucuuccug

SEQ ID NO: 1816 - RNA, 20 nt, Artificial Sequence
  Synthetic
acucccacucacuucuuccu

SEQ ID NO: 1817 - RNA, 20 nt, Artificial Sequence
  Synthetic
aacucccacucacuucuucc

SEQ ID NO: 1818 - RNA, 20 nt, Artificial Sequence
  Synthetic
gaacucccacucacuucuuc

SEQ ID NO: 1819 - RNA, 20 nt, Artificial Sequence
  Synthetic
ggaacucccacucacuucuu

SEQ ID NO: 1820 - RNA, 20 nt, Artificial Sequence
  Synthetic
uggaacucccacucacuucu

SEQ ID NO: 1821 - RNA, 20 nt, Artificial Sequence
  Synthetic
uuggaacucccacucacuuc

SEQ ID NO: 1822 - RNA, 20 nt, Artificial Sequence
  Synthetic
cuuggaacucccacucacuu

SEQ ID NO: 1823 - RNA, 20 nt, Artificial Sequence
  Synthetic
ucuuggaacucccacucacu

SEQ ID NO: 1824 - RNA, 20 nt, Artificial Sequence
  Synthetic
cucuuggaacucccacucac

SEQ ID NO: 1825 - RNA, 20 nt, Artificial Sequence
  Synthetic
ccucuuggaacucccacuca

SEQ ID NO: 1826 - RNA, 20 nt, Artificial Sequence
  Synthetic
uccucuuggaacucccacuc

SEQ ID NO: 1827 - RNA, 20 nt, Artificial Sequence
  Synthetic
cuccucuuggaacucccacu

SEQ ID NO: 1828 - RNA, 20 nt, Artificial Sequence
  Synthetic
ccuccucuuggaacucccac

SEQ ID NO: 1829 - RNA, 20 nt, Artificial Sequence
  Synthetic
cccuccucuuggaacuccca

SEQ ID NO: 1830 - RNA, 20 nt, Artificial Sequence
  Synthetic
acccuccucuuggaacuccc

SEQ ID NO: 1831 - RNA, 20 nt, Artificial Sequence
  Synthetic
aacccuccucuuggaacucc

SEQ ID NO: 1832 - RNA, 20 nt, Artificial Sequence
  Synthetic
caacccuccucuuggaacuc

SEQ ID NO: 1833 - RNA, 20 nt, Artificial Sequence
  Synthetic
ccaacccuccucuuggaacu

SEQ ID NO: 1834 - RNA, 20 nt, Artificial Sequence
  Synthetic
accaacccuccucuuggaac

SEQ ID NO: 1835 - RNA, 20 nt, Artificial Sequence
  Synthetic
caccaacccuccucuuggaa

SEQ ID NO: 1836 - RNA, 20 nt, Artificial Sequence
  Synthetic
ccaccaacccuccucuugga

SEQ ID NO: 1837 - RNA, 20 nt, Artificial Sequence
  Synthetic
cccaccaacccuccucuugg

SEQ ID NO: 1838 - RNA, 20 nt, Artificial Sequence
  Synthetic
ccccaccaacccuccucuug

SEQ ID NO: 1839 - RNA, 20 nt, Artificial Sequence
  Synthetic
uccccaccaacccuccucuu

SEQ ID NO: 1840 - RNA, 20 nt, Artificial Sequence
  Synthetic
guccccaccaacccuccucu

SEQ ID NO: 1841 - RNA, 20 nt, Artificial Sequence
  Synthetic
cguccccaccaacccuccuc

SEQ ID NO: 1842 - RNA, 20 nt, Artificial Sequence
  Synthetic
ccguccccaccaacccuccu

SEQ ID NO: 1843 - RNA, 20 nt, Artificial Sequence
  Synthetic
cccguccccaccaacccucc

SEQ ID NO: 1844 - RNA, 20 nt, Artificial Sequence
  Synthetic
ccccguccccaccaacccuc

SEQ ID NO: 1845 - RNA, 20 nt, Artificial Sequence
  Synthetic
uccccguccccaccaacccu

SEQ ID NO: 1846 - RNA, 20 nt, Artificial Sequence
  Synthetic
uuccccguccccaccaaccc

SEQ ID NO: 1847 - RNA, 20 nt, Artificial Sequence
  Synthetic
cuuccccguccccaccaacc

SEQ ID NO: 1848 - RNA, 20 nt, Artificial Sequence
  Synthetic
acuuccccguccccaccaac

SEQ ID NO: 1849 - RNA, 20 nt, Artificial Sequence
  Synthetic
cacuuccccguccccaccaa

SEQ ID NO: 1850 - RNA, 20 nt, Artificial Sequence
  Synthetic
ccacuuccccguccccacca

SEQ ID NO: 1851 - RNA, 20 nt, Artificial Sequence
  Synthetic
cccacuuccccguccccacc

SEQ ID NO: 1852 - RNA, 20 nt, Artificial Sequence
  Synthetic
ccccacuuccccguccccac

SEQ ID NO: 1853 - RNA, 20 nt, Artificial Sequence
  Synthetic
cccccacuuccccgucccca

SEQ ID NO: 1854 - RNA, 20 nt, Artificial Sequence
  Synthetic
acccccacuuccccgucccc

SEQ ID NO: 1855 - RNA, 20 nt, Artificial Sequence
  Synthetic
cacccccacuuccccguccc

SEQ ID NO: 1856 - RNA, 20 nt, Artificial Sequence
  Synthetic
ccacccccacuuccccgucc

SEQ ID NO: 1857 - RNA, 20 nt, Artificial Sequence
  Synthetic
cccacccccacuuccccguc

SEQ ID NO: 1858 - RNA, 20 nt, Artificial Sequence
  Synthetic
ccccacccccacuuccccgu

SEQ ID NO: 1859 - RNA, 20 nt, Artificial Sequence
  Synthetic
cccccacccccacuuccccg

SEQ ID NO: 1860 - RNA, 20 nt, Artificial Sequence
  Synthetic
acccccacccccacuucccc

SEQ ID NO: 1861 - RNA, 20 nt, Artificial Sequence
  Synthetic
cacccccacccccacuuccc

SEQ ID NO: 1862 - RNA, 20 nt, Artificial Sequence
  Synthetic
ccacccccacccccacuucc

SEQ ID NO: 1863 - RNA, 20 nt, Artificial Sequence
  Synthetic
cccacccccacccccacuuc

SEQ ID NO: 1864 - RNA, 20 nt, Artificial Sequence
  Synthetic
ccccacccccacccccacuu

SEQ ID NO: 1865 - RNA, 20 nt, Artificial Sequence
  Synthetic
uccccacccccacccccacu

SEQ ID NO: 1866 - RNA, 20 nt, Artificial Sequence
  Synthetic
uuccccacccccacccccac

SEQ ID NO: 1867 - RNA, 20 nt, Artificial Sequence
  Synthetic
cuuccccacccccaccccca

SEQ ID NO: 1868 - RNA, 20 nt, Artificial Sequence
  Synthetic
acuuccccacccccaccccc

SEQ ID NO: 1869 - RNA, 20 nt, Artificial Sequence
  Synthetic
cacuuccccacccccacccc

SEQ ID NO: 1870 - RNA, 20 nt, Artificial Sequence
  Synthetic
ccacuuccccacccccaccc

SEQ ID NO: 1871 - RNA, 20 nt, Artificial Sequence
  Synthetic
cccacuuccccacccccacc

SEQ ID NO: 1872 - RNA, 20 nt, Artificial Sequence
  Synthetic
ccccacuuccccacccccac

SEQ ID NO: 1873 - RNA, 20 nt, Artificial Sequence
  Synthetic
cccccacuuccccaccccca

SEQ ID NO: 1874 - RNA, 20 nt, Artificial Sequence
  Synthetic
acccccacuuccccaccccc

SEQ ID NO: 1875 - RNA, 20 nt, Artificial Sequence
  Synthetic
cacccccacuuccccacccc

SEQ ID NO: 1876 - RNA, 20 nt, Artificial Sequence
  Synthetic
ccacccccacuuccccaccc

SEQ ID NO: 1877 - RNA, 20 nt, Artificial Sequence
  Synthetic
cccacccccacuuccccacc

SEQ ID NO: 1878 - RNA, 20 nt, Artificial Sequence
  Synthetic
ccccacccccacuuccccac

SEQ ID NO: 1879 - RNA, 20 nt, Artificial Sequence
  Synthetic
cccccacccccacuucccca

SEQ ID NO: 1880 - RNA, 20 nt, Artificial Sequence
  Synthetic
acacccccacccccacuucc

SEQ ID NO: 1881 - RNA, 20 nt, Artificial Sequence
  Synthetic
gacacccccacccccacuuc

SEQ ID NO: 1882 - RNA, 20 nt, Artificial Sequence
  Synthetic
ugacacccccacccccacuu

SEQ ID NO: 1883 - RNA, 20 nt, Artificial Sequence
  Synthetic
augacacccccacccccacu

SEQ ID NO: 1884 - RNA, 20 nt, Artificial Sequence
  Synthetic
caugacacccccacccccac

SEQ ID NO: 1885 - RNA, 20 nt, Artificial Sequence
  Synthetic
ccaugacacccccaccccca

SEQ ID NO: 1886 - RNA, 20 nt, Artificial Sequence
  Synthetic
uccaugacacccccaccccc

SEQ ID NO: 1887 - RNA, 20 nt, Artificial Sequence
  Synthetic
cuccaugacacccccacccc

SEQ ID NO: 1888 - RNA, 20 nt, Artificial Sequence
  Synthetic
ccuccaugacacccccaccc

SEQ ID NO: 1889 - RNA, 20 nt, Artificial Sequence
  Synthetic
accuccaugacacccccacc

SEQ ID NO: 1890 - RNA, 20 nt, Artificial Sequence
  Synthetic
caccuccaugacacccccac

SEQ ID NO: 1891 - RNA, 20 nt, Artificial Sequence
  Synthetic
ucaccuccaugacaccccca

SEQ ID NO: 1892 - RNA, 20 nt, Artificial Sequence
  Synthetic
cucaccuccaugacaccccc

SEQ ID NO: 1893 - RNA, 20 nt, Artificial Sequence
  Synthetic
ccucaccuccaugacacccc

SEQ ID NO: 1894 - RNA, 20 nt, Artificial Sequence
  Synthetic
cccucaccuccaugacaccc

SEQ ID NO: 1895 - RNA, 20 nt, Artificial Sequence
  Synthetic
gcccucaccuccaugacacc

SEQ ID NO: 1896 - RNA, 20 nt, Artificial Sequence
  Synthetic
agcccucaccuccaugacac

SEQ ID NO: 1897 - RNA, 20 nt, Artificial Sequence
  Synthetic
cagcccucaccuccaugaca

SEQ ID NO: 1898 - RNA, 20 nt, Artificial Sequence
  Synthetic
ccagcccucaccuccaugac

SEQ ID NO: 1899 - RNA, 20 nt, Artificial Sequence
  Synthetic
accagcccucaccuccauga

SEQ ID NO: 1900 - RNA, 20 nt, Artificial Sequence
  Synthetic
caccagcccucaccuccaug

SEQ ID NO: 1901 - RNA, 20 nt, Artificial Sequence
  Synthetic
ccaccagcccucaccuccau

SEQ ID NO: 1902 - RNA, 20 nt, Artificial Sequence
  Synthetic
cccaccagcccucaccucca

SEQ ID NO: 1903 - DNA, 20 bp, Artificial Sequence
  Synthetic
cctggccactgcctcctcct

SEQ ID NO: 1904 - DNA, 20 bp, Artificial Sequence
  Synthetic
tcctggccactgcctcctcc

SEQ ID NO: 1905 - DNA, 20 bp, Artificial Sequence
  Synthetic
ttcctggccactgcctcctc

SEQ ID NO: 1906 - DNA, 20 bp, Artificial Sequence
  Synthetic
cttcctggccactgcctcct

SEQ ID NO: 1907 - DNA, 20 bp, Artificial Sequence
  Synthetic
ccttcctggccactgcctcc

SEQ ID NO: 1908 - DNA, 20 bp, Artificial Sequence
  Synthetic
gccttcctggccactgcctc

SEQ ID NO: 1909 - DNA, 20 bp, Artificial Sequence
  Synthetic
tgccttcctggccactgcct

SEQ ID NO: 1910 - DNA, 20 bp, Artificial Sequence
  Synthetic
gtgccttcctggccactgcc

SEQ ID NO: 1911 - DNA, 20 bp, Artificial Sequence
  Synthetic
tgtgccttcctggccactgc

SEQ ID NO: 1912 - DNA, 20 bp, Artificial Sequence
  Synthetic
ctgtgccttcctggccactg

SEQ ID NO: 1913 - DNA, 20 bp, Artificial Sequence
  Synthetic
cctgtgccttcctggccact

SEQ ID NO: 1914 - DNA, 20 bp, Artificial Sequence
  Synthetic
gcctgtgccttcctggccac

SEQ ID NO: 1915 - DNA, 20 bp, Artificial Sequence
  Synthetic
ggcctgtgccttcctggcca

SEQ ID NO: 1916 - DNA, 20 bp, Artificial Sequence
  Synthetic
aggcctgtgccttcctggcc

SEQ ID NO: 1917 - DNA, 20 bp, Artificial Sequence
  Synthetic
caggcctgtgccttcctggc

SEQ ID NO: 1918 - DNA, 20 bp, Artificial Sequence
  Synthetic
tcaggcctgtgccttcctgg

SEQ ID NO: 1919 - DNA, 20 bp, Artificial Sequence
  Synthetic
ctcaggcctgtgccttcctg

SEQ ID NO: 1920 - DNA, 20 bp, Artificial Sequence
  Synthetic
tctcaggcctgtgccttcct

SEQ ID NO: 1921 - DNA, 20 bp, Artificial Sequence
  Synthetic
ttctcaggcctgtgccttcc

SEQ ID NO: 1922 - DNA, 20 bp, Artificial Sequence
  Synthetic
cttctcaggcctgtgccttc

SEQ ID NO: 1923 - DNA, 20 bp, Artificial Sequence
  Synthetic
acttctcaggcctgtgcctt

SEQ ID NO: 1924 - DNA, 20 bp, Artificial Sequence
  Synthetic
gacttctcaggcctgtgcct

SEQ ID NO: 1925 - DNA, 20 bp, Artificial Sequence
  Synthetic
agacttctcaggcctgtgcc

SEQ ID NO: 1926 - DNA, 20 bp, Artificial Sequence
  Synthetic
cagacttctcaggcctgtgc

SEQ ID NO: 1927 - DNA, 20 bp, Artificial Sequence
  Synthetic
gcagacttctcaggcctgtg

SEQ ID NO: 1928 - DNA, 20 bp, Artificial Sequence
  Synthetic
cgcagacttctcaggcctgt

SEQ ID NO: 1929 - DNA, 20 bp, Artificial Sequence
  Synthetic
ccgcagacttctcaggcctg

SEQ ID NO: 1930 - DNA, 20 bp, Artificial Sequence
  Synthetic
gccgcagacttctcaggcct

SEQ ID NO: 1931 - DNA, 20 bp, Artificial Sequence
  Synthetic
tcagccgcagacttctcagg

SEQ ID NO: 1932 - DNA, 20 bp, Artificial Sequence
  Synthetic
ctcagccgcagacttctcag

SEQ ID NO: 1933 - DNA, 20 bp, Artificial Sequence
  Synthetic
gctcagccgcagacttctca

SEQ ID NO: 1934 - DNA, 20 bp, Artificial Sequence
  Synthetic
agctcagccgcagacttctc

SEQ ID NO: 1935 - DNA, 20 bp, Artificial Sequence
  Synthetic
cagctcagccgcagacttct

SEQ ID NO: 1936 - DNA, 20 bp, Artificial Sequence
  Synthetic
ccagctcagccgcagacttc

SEQ ID NO: 1937 - DNA, 20 bp, Artificial Sequence
  Synthetic
cccagctcagccgcagactt

SEQ ID NO: 1938 - DNA, 20 bp, Artificial Sequence
  Synthetic
tcccagctcagccgcagact

SEQ ID NO: 1939 - DNA, 20 bp, Artificial Sequence
  Synthetic
ctcccagctcagccgcagac

SEQ ID NO: 1940 - DNA, 20 bp, Artificial Sequence
  Synthetic
gctcccagctcagccgcaga

SEQ ID NO: 1941 - DNA, 20 bp, Artificial Sequence
  Synthetic
tgctcccagctcagccgcag

SEQ ID NO: 1942 - DNA, 20 bp, Artificial Sequence
  Synthetic
ttgctcccagctcagccgca

SEQ ID NO: 1943 - DNA, 20 bp, Artificial Sequence
  Synthetic
tttgctcccagctcagccgc

SEQ ID NO: 1944 - DNA, 20 bp, Artificial Sequence
  Synthetic
atttgctcccagctcagccg

SEQ ID NO: 1945 - DNA, 20 bp, Artificial Sequence
  Synthetic
gatttgctcccagctcagcc

SEQ ID NO: 1946 - DNA, 20 bp, Artificial Sequence
  Synthetic
ggatttgctcccagctcagc

SEQ ID NO: 1947 - DNA, 20 bp, Artificial Sequence
  Synthetic
gggatttgctcccagctcag

SEQ ID NO: 1948 - DNA, 20 bp, Artificial Sequence
  Synthetic
ggggatttgctcccagctca

SEQ ID NO: 1949 - DNA, 20 bp, Artificial Sequence
  Synthetic
gggggatttgctcccagctc

SEQ ID NO: 1950 - DNA, 20 bp, Artificial Sequence
  Synthetic
tgggggatttgctcccagct

SEQ ID NO: 1951 - DNA, 20 bp, Artificial Sequence
  Synthetic
gtgggggatttgctcccagc

SEQ ID NO: 1952 - DNA, 20 bp, Artificial Sequence
  Synthetic
ggtgggggatttgctcccag

SEQ ID NO: 1953 - DNA, 20 bp, Artificial Sequence
  Synthetic
gggtgggggatttgctccca

SEQ ID NO: 1954 - DNA, 20 bp, Artificial Sequence
  Synthetic
ggggtgggggatttgctccc

SEQ ID NO: 1955 - DNA, 20 bp, Artificial Sequence
  Synthetic
gggggtgggggatttgctcc

SEQ ID NO: 1956 - DNA, 20 bp, Artificial Sequence
  Synthetic
agggggtgggggatttgctc

SEQ ID NO: 1957 - DNA, 20 bp, Artificial Sequence
  Synthetic
tagggggtgggggatttgct

SEQ ID NO: 1958 - DNA, 20 bp, Artificial Sequence
  Synthetic
gtagggggtgggggatttgc

SEQ ID NO: 1959 - DNA, 20 bp, Artificial Sequence
  Synthetic
ggtagggggtgggggatttg

SEQ ID NO: 1960 - DNA, 20 bp, Artificial Sequence
  Synthetic
aggtagggggtgggggattt

SEQ ID NO: 1961 - DNA, 20 bp, Artificial Sequence
  Synthetic
caggtagggggtgggggatt

SEQ ID NO: 1962 - DNA, 20 bp, Artificial Sequence
  Synthetic
ccaggtagggggtgggggat

SEQ ID NO: 1963 - DNA, 20 bp, Artificial Sequence
  Synthetic
cccccaggtagggggtgggg

SEQ ID NO: 1964 - DNA, 20 bp, Artificial Sequence
  Synthetic
tcccccaggtagggggtggg

SEQ ID NO: 1965 - DNA, 20 bp, Artificial Sequence
  Synthetic
gtcccccaggtagggggtgg

SEQ ID NO: 1966 - DNA, 20 bp, Artificial Sequence
  Synthetic
tgtcccccaggtagggggtg

SEQ ID NO: 1967 - DNA, 20 bp, Artificial Sequence
  Synthetic
ctgtcccccaggtagggggt

SEQ ID NO: 1968 - DNA, 20 bp, Artificial Sequence
  Synthetic
cctgtcccccaggtaggggg

SEQ ID NO: 1969 - DNA, 20 bp, Artificial Sequence
  Synthetic
ccctgtcccccaggtagggg

SEQ ID NO: 1970 - DNA, 20 bp, Artificial Sequence
  Synthetic
gccctgtcccccaggtaggg

SEQ ID NO: 1971 - DNA, 20 bp, Artificial Sequence
  Synthetic
tgccctgtcccccaggtagg

SEQ ID NO: 1972 - DNA, 20 bp, Artificial Sequence
  Synthetic
ttgccctgtcccccaggtag

SEQ ID NO: 1973 - DNA, 20 bp, Artificial Sequence
  Synthetic
cttgccctgtcccccaggta

SEQ ID NO: 1974 - DNA, 20 bp, Artificial Sequence
  Synthetic
acttgccctgtcccccaggt

SEQ ID NO: 1975 - DNA, 20 bp, Artificial Sequence
  Synthetic
cacttgccctgtcccccagg

SEQ ID NO: 1976 - DNA, 20 bp, Artificial Sequence
  Synthetic
tcacttgccctgtcccccag

SEQ ID NO: 1977 - DNA, 20 bp, Artificial Sequence
  Synthetic
ctcacttgccctgtccccca

SEQ ID NO: 1978 - DNA, 20 bp, Artificial Sequence
  Synthetic
tctcacttgccctgtccccc

SEQ ID NO: 1979 - DNA, 20 bp, Artificial Sequence
  Synthetic
gtctcacttgccctgtcccc

SEQ ID NO: 1980 - DNA, 20 bp, Artificial Sequence
  Synthetic
ggtctcacttgccctgtccc

SEQ ID NO: 1981 - DNA, 20 bp, Artificial Sequence
  Synthetic
aggtctcacttgccctgtcc

SEQ ID NO: 1982 - DNA, 20 bp, Artificial Sequence
  Synthetic
caggtctcacttgccctgtc

SEQ ID NO: 1983 - DNA, 20 bp, Artificial Sequence
  Synthetic
ccaggtctcacttgccctgt

SEQ ID NO: 1984 - DNA, 20 bp, Artificial Sequence
  Synthetic
accaggtctcacttgccctg

SEQ ID NO: 1985 - DNA, 20 bp, Artificial Sequence
  Synthetic
caccaggtctcacttgccct

SEQ ID NO: 1986 - DNA, 20 bp, Artificial Sequence
  Synthetic
tcaccaggtctcacttgccc

SEQ ID NO: 1987 - DNA, 20 bp, Artificial Sequence
  Synthetic
ctcaccaggtctcacttgcc

SEQ ID NO: 1988 - DNA, 20 bp, Artificial Sequence
  Synthetic
cctcaccaggtctcacttgc

SEQ ID NO: 1989 - DNA, 20 bp, Artificial Sequence
  Synthetic
ccctcaccaggtctcacttg

SEQ ID NO: 1990 - DNA, 20 bp, Artificial Sequence
  Synthetic
accctcaccaggtctcactt

SEQ ID NO: 1991 - DNA, 20 bp, Artificial Sequence
  Synthetic
caccctcaccaggtctcact

SEQ ID NO: 1992 - DNA, 20 bp, Artificial Sequence
  Synthetic
ccaccctcaccaggtctcac

SEQ ID NO: 1993 - DNA, 20 bp, Artificial Sequence
  Synthetic
gccaccctcaccaggtctca

SEQ ID NO: 1994 - DNA, 20 bp, Artificial Sequence
  Synthetic
agccaccctcaccaggtctc

SEQ ID NO: 1995 - DNA, 20 bp, Artificial Sequence
  Synthetic
gagccaccctcaccaggtct

SEQ ID NO: 1996 - DNA, 20 bp, Artificial Sequence
  Synthetic
tgagccaccctcaccaggtc

SEQ ID NO: 1997 - DNA, 20 bp, Artificial Sequence
  Synthetic
ctgagccaccctcaccaggt

SEQ ID NO: 1998 - DNA, 20 bp, Artificial Sequence
  Synthetic
gctgagccaccctcaccagg

SEQ ID NO: 1999 - DNA, 20 bp, Artificial Sequence
  Synthetic
tgctgagccaccctcaccag

SEQ ID NO: 2000 - DNA, 20 bp, Artificial Sequence
  Synthetic
ctgctgagccaccctcacca

SEQ ID NO: 2001 - DNA, 20 bp, Artificial Sequence
  Synthetic
cctgctgagccaccctcacc

SEQ ID NO: 2002 - DNA, 20 bp, Artificial Sequence
  Synthetic
gcctgctgagccaccctcac

SEQ ID NO: 2003 - DNA, 20 bp, Artificial Sequence
  Synthetic
tgcctgctgagccaccctca

SEQ ID NO: 2004 - DNA, 20 bp, Artificial Sequence
  Synthetic
ctgcctgctgagccaccctc

SEQ ID NO: 2005 - DNA, 20 bp, Artificial Sequence
  Synthetic
cctgcctgctgagccaccct

SEQ ID NO: 2006 - DNA, 20 bp, Artificial Sequence
  Synthetic
ccctgcctgctgagccaccc

SEQ ID NO: 2007 - DNA, 20 bp, Artificial Sequence
  Synthetic
tccctgcctgctgagccacc

SEQ ID NO: 2008 - DNA, 20 bp, Artificial Sequence
  Synthetic
ttccctgcctgctgagccac

SEQ ID NO: 2009 - DNA, 20 bp, Artificial Sequence
  Synthetic
cttccctgcctgctgagcca

SEQ ID NO: 2010 - DNA, 20 bp, Artificial Sequence
  Synthetic
ccttccctgcctgctgagcc

SEQ ID NO: 2011 - DNA, 20 bp, Artificial Sequence
  Synthetic
tccttccctgcctgctgagc

SEQ ID NO: 2012 - DNA, 20 bp, Artificial Sequence
  Synthetic
ctccttccctgcctgctgag

SEQ ID NO: 2013 - DNA, 20 bp, Artificial Sequence
  Synthetic
tctccttccctgcctgctga

SEQ ID NO: 2014 - DNA, 20 bp, Artificial Sequence
  Synthetic
ctctccttccctgcctgctg

SEQ ID NO: 2015 - DNA, 20 bp, Artificial Sequence
  Synthetic
cctctccttccctgcctgct

SEQ ID NO: 2016 - DNA, 20 bp, Artificial Sequence
  Synthetic
acctctccttccctgcctgc

SEQ ID NO: 2017 - DNA, 20 bp, Artificial Sequence
  Synthetic
cacctctccttccctgcctg

SEQ ID NO: 2018 - DNA, 20 bp, Artificial Sequence
  Synthetic
acacctctccttccctgcct

SEQ ID NO: 2019 - DNA, 20 bp, Artificial Sequence
  Synthetic
gacacctctccttccctgcc

SEQ ID NO: 2020 - DNA, 20 bp, Artificial Sequence
  Synthetic
agacacctctccttccctgc

SEQ ID NO: 2021 - DNA, 20 bp, Artificial Sequence
  Synthetic
cagacacctctccttccctg

SEQ ID NO: 2022 - DNA, 20 bp, Artificial Sequence
  Synthetic
acagacacctctccttccct

SEQ ID NO: 2023 - DNA, 20 bp, Artificial Sequence
  Synthetic
cacagacacctctccttccc

SEQ ID NO: 2024 - DNA, 20 bp, Artificial Sequence
  Synthetic
gcacagacacctctccttcc

SEQ ID NO: 2025 - DNA, 20 bp, Artificial Sequence
  Synthetic
cgcacagacacctctccttc

SEQ ID NO: 2026 - DNA, 20 bp, Artificial Sequence
  Synthetic
acgcacagacacctctcctt

SEQ ID NO: 2027 - DNA, 20 bp, Artificial Sequence
  Synthetic
gacgcacagacacctctcct

SEQ ID NO: 2028 - DNA, 20 bp, Artificial Sequence
  Synthetic
ggacgcacagacacctctcc

SEQ ID NO: 2029 - DNA, 20 bp, Artificial Sequence
  Synthetic
aggacgcacagacacctctc

SEQ ID NO: 2030 - DNA, 20 bp, Artificial Sequence
  Synthetic
caggacgcacagacacctct

SEQ ID NO: 2031 - DNA, 20 bp, Artificial Sequence
  Synthetic
gcaggacgcacagacacctc

SEQ ID NO: 2032 - DNA, 20 bp, Artificial Sequence
  Synthetic
tgcaggacgcacagacacct

SEQ ID NO: 2033 - DNA, 20 bp, Artificial Sequence
  Synthetic
gtgcaggacgcacagacacc

SEQ ID NO: 2034 - DNA, 20 bp, Artificial Sequence
  Synthetic
ggtgcaggacgcacagacac

SEQ ID NO: 2035 - DNA, 20 bp, Artificial Sequence
  Synthetic
gggtgcaggacgcacagaca

SEQ ID NO: 2036 - DNA, 20 bp, Artificial Sequence
  Synthetic
tgggtgcaggacgcacagac

SEQ ID NO: 2037 - DNA, 20 bp, Artificial Sequence
  Synthetic
gtgggtgcaggacgcacaga

SEQ ID NO: 2038 - DNA, 20 bp, Artificial Sequence
  Synthetic
tgtgggtgcaggacgcacag

SEQ ID NO: 2039 - DNA, 20 bp, Artificial Sequence
  Synthetic
atgtgggtgcaggacgcaca

SEQ ID NO: 2040 - DNA, 20 bp, Artificial Sequence
  Synthetic
gatgtgggtgcaggacgcac

SEQ ID NO: 2041 - DNA, 20 bp, Artificial Sequence
  Synthetic
agatgtgggtgcaggacgca

SEQ ID NO: 2042 - DNA, 20 bp, Artificial Sequence
  Synthetic
aagatgtgggtgcaggacgc

SEQ ID NO: 2043 - DNA, 20 bp, Artificial Sequence
  Synthetic
agagaaagatgtgggtgcag

SEQ ID NO: 2044 - DNA, 20 bp, Artificial Sequence
  Synthetic
cagagaaagatgtgggtgca

SEQ ID NO: 2045 - DNA, 20 bp, Artificial Sequence
  Synthetic
acagagaaagatgtgggtgc

SEQ ID NO: 2046 - DNA, 20 bp, Artificial Sequence
  Synthetic
gacagagaaagatgtgggtg

SEQ ID NO: 2047 - DNA, 20 bp, Artificial Sequence
  Synthetic
ggacagagaaagatgtgggt

SEQ ID NO: 2048 - DNA, 20 bp, Artificial Sequence
  Synthetic
gggacagagaaagatgtggg

SEQ ID NO: 2049 - DNA, 20 bp, Artificial Sequence
  Synthetic
ggggacagagaaagatgtgg

SEQ ID NO: 2050 - DNA, 20 bp, Artificial Sequence
  Synthetic
aggggacagagaaagatgtg

SEQ ID NO: 2051 - DNA, 20 bp, Artificial Sequence
  Synthetic
gaggggacagagaaagatgt

SEQ ID NO: 2052 - DNA, 20 bp, Artificial Sequence
  Synthetic
ggaggggacagagaaagatg

SEQ ID NO: 2053 - DNA, 20 bp, Artificial Sequence
  Synthetic
aggaggggacagagaaagat

SEQ ID NO: 2054 - DNA, 20 bp, Artificial Sequence
  Synthetic
tccagacagggcaaggaggg

SEQ ID NO: 2055 - DNA, 20 bp, Artificial Sequence
  Synthetic
ctccagacagggcaaggagg

SEQ ID NO: 2056 - DNA, 20 bp, Artificial Sequence
  Synthetic
cctccagacagggcaaggag

SEQ ID NO: 2057 - DNA, 20 bp, Artificial Sequence
  Synthetic
gcctccagacagggcaagga

SEQ ID NO: 2058 - DNA, 20 bp, Artificial Sequence
  Synthetic
agcctccagacagggcaagg

SEQ ID NO: 2059 - DNA, 20 bp, Artificial Sequence
  Synthetic
tagcagcctccagacagggc

SEQ ID NO: 2060 - DNA, 20 bp, Artificial Sequence
  Synthetic
ctagcagcctccagacaggg

SEQ ID NO: 2061 - DNA, 20 bp, Artificial Sequence
  Synthetic
tctagcagcctccagacagg

SEQ ID NO: 2062 - DNA, 20 bp, Artificial Sequence
  Synthetic
gtctagcagcctccagacag

SEQ ID NO: 2063 - DNA, 20 bp, Artificial Sequence
  Synthetic
agtctagcagcctccagaca

SEQ ID NO: 2064 - DNA, 20 bp, Artificial Sequence
  Synthetic
gagtctagcagcctccagac

SEQ ID NO: 2065 - DNA, 20 bp, Artificial Sequence
  Synthetic
ggagtctagcagcctccaga

SEQ ID NO: 2066 - DNA, 20 bp, Artificial Sequence
  Synthetic
aggagtctagcagcctccag

SEQ ID NO: 2067 - DNA, 20 bp, Artificial Sequence
  Synthetic
taggagtctagcagcctcca

SEQ ID NO: 2068 - DNA, 20 bp, Artificial Sequence
  Synthetic
ataggagtctagcagcctcc

SEQ ID NO: 2069 - DNA, 20 bp, Artificial Sequence
  Synthetic
gataggagtctagcagcctc

SEQ ID NO: 2070 - DNA, 20 bp, Artificial Sequence
  Synthetic
agataggagtctagcagcct

SEQ ID NO: 2071 - DNA, 20 bp, Artificial Sequence
  Synthetic
aagataggagtctagcagcc

SEQ ID NO: 2072 - DNA, 20 bp, Artificial Sequence
  Synthetic
cagaagataggagtctagca

SEQ ID NO: 2073 - DNA, 20 bp, Artificial Sequence
  Synthetic
tcagaagataggagtctagc

SEQ ID NO: 2074 - DNA, 20 bp, Artificial Sequence
  Synthetic
ttcagaagataggagtctag

SEQ ID NO: 2075 - DNA, 20 bp, Artificial Sequence
  Synthetic
attcagaagataggagtcta

SEQ ID NO: 2076 - DNA, 20 bp, Artificial Sequence
  Synthetic
aattcagaagataggagtct

SEQ ID NO: 2077 - DNA, 20 bp, Artificial Sequence
  Synthetic
gaattcagaagataggagtc

SEQ ID NO: 2078 - DNA, 20 bp, Artificial Sequence
  Synthetic
agaattcagaagataggagt

SEQ ID NO: 2079 - DNA, 20 bp, Artificial Sequence
  Synthetic
tagaattcagaagataggag

SEQ ID NO: 2080 - DNA, 20 bp, Artificial Sequence
  Synthetic
atagaattcagaagatagga

SEQ ID NO: 2081 - DNA, 20 bp, Artificial Sequence
  Synthetic
tatagaattcagaagatagg

SEQ ID NO: 2082 - DNA, 20 bp, Artificial Sequence
  Synthetic
ctatagaattcagaagatag

SEQ ID NO: 2083 - DNA, 20 bp, Artificial Sequence
  Synthetic
actatagaattcagaagata

SEQ ID NO: 2084 - DNA, 20 bp, Artificial Sequence
  Synthetic
cactatagaattcagaagat

SEQ ID NO: 2085 - DNA, 20 bp, Artificial Sequence
  Synthetic
gcactatagaattcagaaga

SEQ ID NO: 2086 - DNA, 20 bp, Artificial Sequence
  Synthetic
caggcactatagaattcaga

SEQ ID NO: 2087 - DNA, 20 bp, Artificial Sequence
  Synthetic
ccaggcactatagaattcag

SEQ ID NO: 2088 - DNA, 20 bp, Artificial Sequence
  Synthetic
cccaggcactatagaattca

SEQ ID NO: 2089 - DNA, 20 bp, Artificial Sequence
  Synthetic
acccaggcactatagaattc

SEQ ID NO: 2090 - DNA, 20 bp, Artificial Sequence
  Synthetic
gacccaggcactatagaatt

SEQ ID NO: 2091 - DNA, 20 bp, Artificial Sequence
  Synthetic
agacccaggcactatagaat

SEQ ID NO: 2092 - DNA, 20 bp, Artificial Sequence
  Synthetic
gagacccaggcactatagaa

SEQ ID NO: 2093 - DNA, 20 bp, Artificial Sequence
  Synthetic
tgagacccaggcactataga

SEQ ID NO: 2094 - DNA, 20 bp, Artificial Sequence
  Synthetic
ctgagacccaggcactatag

SEQ ID NO: 2095 - DNA, 20 bp, Artificial Sequence
  Synthetic
gctgagacccaggcactata

SEQ ID NO: 2096 - DNA, 20 bp, Artificial Sequence
  Synthetic
cgctgagacccaggcactat

SEQ ID NO: 2097 - DNA, 20 bp, Artificial Sequence
  Synthetic
gcgctgagacccaggcacta

SEQ ID NO: 2098 - DNA, 20 bp, Artificial Sequence
  Synthetic
tgcgctgagacccaggcact

SEQ ID NO: 2099 - DNA, 20 bp, Artificial Sequence
  Synthetic
ctgcgctgagacccaggcac

SEQ ID NO: 2100 - DNA, 20 bp, Artificial Sequence
  Synthetic
actgcgctgagacccaggca

SEQ ID NO: 2101 - DNA, 20 bp, Artificial Sequence
  Synthetic
cactgcgctgagacccaggc

SEQ ID NO: 2102 - DNA, 20 bp, Artificial Sequence
  Synthetic
gcactgcgctgagacccagg

SEQ ID NO: 2103 - DNA, 20 bp, Artificial Sequence
  Synthetic
tcggcactgcgctgagaccc

SEQ ID NO: 2104 - DNA, 20 bp, Artificial Sequence
  Synthetic
atcggcactgcgctgagacc

SEQ ID NO: 2105 - DNA, 20 bp, Artificial Sequence
  Synthetic
catcggcactgcgctgagac

SEQ ID NO: 2106 - DNA, 20 bp, Artificial Sequence
  Synthetic
ccatcggcactgcgctgaga

SEQ ID NO: 2107 - DNA, 20 bp, Artificial Sequence
  Synthetic
accatcggcactgcgctgag

SEQ ID NO: 2108 - DNA, 20 bp, Artificial Sequence
  Synthetic
caccatcggcactgcgctga

SEQ ID NO: 2109 - DNA, 20 bp, Artificial Sequence
  Synthetic
ccaccatcggcactgcgctg

SEQ ID NO: 2110 - DNA, 20 bp, Artificial Sequence
  Synthetic
gccaccatcggcactgcgct

SEQ ID NO: 2111 - DNA, 20 bp, Artificial Sequence
  Synthetic
ggccaccatcggcactgcgc

SEQ ID NO: 2112 - DNA, 20 bp, Artificial Sequence
  Synthetic
gggccaccatcggcactgcg

SEQ ID NO: 2113 - DNA, 20 bp, Artificial Sequence
  Synthetic
cgggccaccatcggcactgc

SEQ ID NO: 2114 - DNA, 20 bp, Artificial Sequence
  Synthetic
acgggccaccatcggcactg

SEQ ID NO: 2115 - DNA, 20 bp, Artificial Sequence
  Synthetic
gacgggccaccatcggcact

SEQ ID NO: 2116 - DNA, 20 bp, Artificial Sequence
  Synthetic
aaggacgggccaccatcggc

SEQ ID NO: 2117 - DNA, 20 bp, Artificial Sequence
  Synthetic
caaggacgggccaccatcgg

SEQ ID NO: 2118 - DNA, 20 bp, Artificial Sequence
  Synthetic
acaaggacgggccaccatcg

SEQ ID NO: 2119 - DNA, 20 bp, Artificial Sequence
  Synthetic
cacaaggacgggccaccatc

SEQ ID NO: 2120 - DNA, 20 bp, Artificial Sequence
  Synthetic
ccacaaggacgggccaccat

SEQ ID NO: 2121 - DNA, 20 bp, Artificial Sequence
  Synthetic
tagagaggaaccacaaggac

SEQ ID NO: 2122 - DNA, 20 bp, Artificial Sequence
  Synthetic
gtagagaggaaccacaagga

SEQ ID NO: 2123 - DNA, 20 bp, Artificial Sequence
  Synthetic
ggtagagaggaaccacaagg

SEQ ID NO: 2124 - DNA, 20 bp, Artificial Sequence
  Synthetic
aggtagagaggaaccacaag

SEQ ID NO: 2125 - DNA, 20 bp, Artificial Sequence
  Synthetic
caggtagagaggaaccacaa

SEQ ID NO: 2126 - DNA, 20 bp, Artificial Sequence
  Synthetic
tccccaggtagagaggaacc

SEQ ID NO: 2127 - DNA, 20 bp, Artificial Sequence
  Synthetic
ttccccaggtagagaggaac

SEQ ID NO: 2128 - DNA, 20 bp, Artificial Sequence
  Synthetic
tttccccaggtagagaggaa

SEQ ID NO: 2129 - DNA, 20 bp, Artificial Sequence
  Synthetic
atttccccaggtagagagga

SEQ ID NO: 2130 - DNA, 20 bp, Artificial Sequence
  Synthetic
tatttccccaggtagagagg

SEQ ID NO: 2131 - DNA, 20 bp, Artificial Sequence
  Synthetic
ttatttccccaggtagagag

SEQ ID NO: 2132 - DNA, 20 bp, Artificial Sequence
  Synthetic
cttatttccccaggtagaga

SEQ ID NO: 2133 - DNA, 20 bp, Artificial Sequence
  Synthetic
ccttatttccccaggtagag

SEQ ID NO: 2134 - DNA, 20 bp, Artificial Sequence
  Synthetic
accttatttccccaggtaga

SEQ ID NO: 2135 - DNA, 20 bp, Artificial Sequence
  Synthetic
caccttatttccccaggtag

SEQ ID NO: 2136 - DNA, 20 bp, Artificial Sequence
  Synthetic
gcaccttatttccccaggta

SEQ ID NO: 2137 - DNA, 20 bp, Artificial Sequence
  Synthetic
tgcaccttatttccccaggt

SEQ ID NO: 2138 - DNA, 20 bp, Artificial Sequence
  Synthetic
ctgcaccttatttccccagg

SEQ ID NO: 2139 - DNA, 20 bp, Artificial Sequence
  Synthetic
gctgcaccttatttccccag

SEQ ID NO: 2140 - DNA, 20 bp, Artificial Sequence
  Synthetic
cgctgcaccttatttcccca

SEQ ID NO: 2141 - DNA, 20 bp, Artificial Sequence
  Synthetic
ccgctgcaccttatttcccc

SEQ ID NO: 2142 - DNA, 20 bp, Artificial Sequence
  Synthetic
gccgctgcaccttatttccc

SEQ ID NO: 2143 - DNA, 20 bp, Artificial Sequence
  Synthetic
ggccgctgcaccttatttcc

SEQ ID NO: 2144 - DNA, 20 bp, Artificial Sequence
  Synthetic
tggccgctgcaccttatttc

SEQ ID NO: 2145 - DNA, 20 bp, Artificial Sequence
  Synthetic
atggccgctgcaccttattt

SEQ ID NO: 2146 - DNA, 20 bp, Artificial Sequence
  Synthetic
catggccgctgcaccttatt

SEQ ID NO: 2147 - DNA, 20 bp, Artificial Sequence
  Synthetic
ccatggccgctgcaccttat

SEQ ID NO: 2148 - DNA, 20 bp, Artificial Sequence
  Synthetic
gccatggccgctgcacctta

SEQ ID NO: 2149 - DNA, 20 bp, Artificial Sequence
  Synthetic
agccatggccgctgcacctt

SEQ ID NO: 2150 - DNA, 20 bp, Artificial Sequence
  Synthetic
tagccatggccgctgcacct

SEQ ID NO: 2151 - DNA, 20 bp, Artificial Sequence
  Synthetic
gtagccatggccgctgcacc

SEQ ID NO: 2152 - DNA, 20 bp, Artificial Sequence
  Synthetic
tgtagccatggccgctgcac

SEQ ID NO: 2153 - DNA, 20 bp, Artificial Sequence
  Synthetic
ctgtagccatggccgctgca

SEQ ID NO: 2154 - DNA, 20 bp, Artificial Sequence
  Synthetic
gctgtagccatggccgctgc

SEQ ID NO: 2155 - DNA, 20 bp, Artificial Sequence
  Synthetic
tgctgtagccatggccgctg

SEQ ID NO: 2156 - DNA, 20 bp, Artificial Sequence
  Synthetic
ttgctgtagccatggccgct

SEQ ID NO: 2157 - DNA, 20 bp, Artificial Sequence
  Synthetic
cttgctgtagccatggccgc

SEQ ID NO: 2158 - DNA, 20 bp, Artificial Sequence
  Synthetic
tcttgctgtagccatggccg

SEQ ID NO: 2159 - DNA, 20 bp, Artificial Sequence
  Synthetic
gtcttgctgtagccatggcc

SEQ ID NO: 2160 - DNA, 20 bp, Artificial Sequence
  Synthetic
ggtcttgctgtagccatggc

SEQ ID NO: 2161 - DNA, 20 bp, Artificial Sequence
  Synthetic
gggtcttgctgtagccatgg

SEQ ID NO: 2162 - DNA, 20 bp, Artificial Sequence
  Synthetic
ggggtcttgctgtagccatg

SEQ ID NO: 2163 - DNA, 20 bp, Artificial Sequence
  Synthetic
gggggtcttgctgtagccat

SEQ ID NO: 2164 - DNA, 20 bp, Artificial Sequence
  Synthetic
aggggggtcttgctgtagcc

SEQ ID NO: 2165 - DNA, 20 bp, Artificial Sequence
  Synthetic
caggggggtcttgctgtagc

SEQ ID NO: 2166 - DNA, 20 bp, Artificial Sequence
  Synthetic
ccaggggggtcttgctgtag

SEQ ID NO: 2167 - DNA, 20 bp, Artificial Sequence
  Synthetic
tccaggggggtcttgctgta

SEQ ID NO: 2168 - DNA, 20 bp, Artificial Sequence
  Synthetic
atccaggggggtcttgctgt

SEQ ID NO: 2169 - DNA, 20 bp, Artificial Sequence
  Synthetic
catccaggggggtcttgctg

SEQ ID NO: 2170 - DNA, 20 bp, Artificial Sequence
  Synthetic
acatccaggggggtcttgct

SEQ ID NO: 2171 - DNA, 20 bp, Artificial Sequence
  Synthetic
cacatccaggggggtcttgc

SEQ ID NO: 2172 - DNA, 20 bp, Artificial Sequence
  Synthetic
ccacatccaggggggtcttg

SEQ ID NO: 2173 - DNA, 20 bp, Artificial Sequence
  Synthetic
cccacatccaggggggtctt

SEQ ID NO: 2174 - DNA, 20 bp, Artificial Sequence
  Synthetic
acccacatccaggggggtct

SEQ ID NO: 2175 - DNA, 20 bp, Artificial Sequence
  Synthetic
cacccacatccaggggggtc

SEQ ID NO: 2176 - DNA, 20 bp, Artificial Sequence
  Synthetic
gcacccacatccaggggggt

SEQ ID NO: 2177 - DNA, 20 bp, Artificial Sequence
  Synthetic
cacagagcacccacatccag

SEQ ID NO: 2178 - DNA, 20 bp, Artificial Sequence
  Synthetic
gcacagagcacccacatcca

SEQ ID NO: 2179 - DNA, 20 bp, Artificial Sequence
  Synthetic
agcacagagcacccacatcc

SEQ ID NO: 2180 - DNA, 20 bp, Artificial Sequence
  Synthetic
gagcacagagcacccacatc

SEQ ID NO: 2181 - DNA, 20 bp, Artificial Sequence
  Synthetic
agagcacagagcacccacat

SEQ ID NO: 2182 - DNA, 20 bp, Artificial Sequence
  Synthetic
tcagagcacagagcacccac

SEQ ID NO: 2183 - DNA, 20 bp, Artificial Sequence
  Synthetic
atcagagcacagagcaccca

SEQ ID NO: 2184 - DNA, 20 bp, Artificial Sequence
  Synthetic
gatcagagcacagagcaccc

SEQ ID NO: 2185 - DNA, 20 bp, Artificial Sequence
  Synthetic
tgatcagagcacagagcacc

SEQ ID NO: 2186 - DNA, 20 bp, Artificial Sequence
  Synthetic
gtgatcagagcacagagcac

SEQ ID NO: 2187 - DNA, 20 bp, Artificial Sequence
  Synthetic
tgtgatcagagcacagagca

SEQ ID NO: 2188 - DNA, 20 bp, Artificial Sequence
  Synthetic
ctgtgatcagagcacagagc

SEQ ID NO: 2189 - DNA, 20 bp, Artificial Sequence
  Synthetic
gctgtgatcagagcacagag

SEQ ID NO: 2190 - DNA, 20 bp, Artificial Sequence
  Synthetic
ggctgtgatcagagcacaga

SEQ ID NO: 2191 - DNA, 20 bp, Artificial Sequence
  Synthetic
aggctgtgatcagagcacag

SEQ ID NO: 2192 - DNA, 20 bp, Artificial Sequence
  Synthetic
gaagcaaggctgtgatcaga

SEQ ID NO: 2193 - DNA, 20 bp, Artificial Sequence
  Synthetic
agaagcaaggctgtgatcag

SEQ ID NO: 2194 - DNA, 20 bp, Artificial Sequence
  Synthetic
cagaagcaaggctgtgatca

SEQ ID NO: 2195 - DNA, 20 bp, Artificial Sequence
  Synthetic
ccagaagcaaggctgtgatc

SEQ ID NO: 2196 - DNA, 20 bp, Artificial Sequence
  Synthetic
cccagaagcaaggctgtgat

SEQ ID NO: 2197 - DNA, 20 bp, Artificial Sequence
  Synthetic
ccccagaagcaaggctgtga

SEQ ID NO: 2198 - DNA, 20 bp, Artificial Sequence
  Synthetic
cccccagaagcaaggctgtg

SEQ ID NO: 2199 - DNA, 20 bp, Artificial Sequence
  Synthetic
acccccagaagcaaggctgt

SEQ ID NO: 2200 - DNA, 20 bp, Artificial Sequence
  Synthetic
gacccccagaagcaaggctg

SEQ ID NO: 2201 - DNA, 20 bp, Artificial Sequence
  Synthetic
tgacccccagaagcaaggct

SEQ ID NO: 2202 - DNA, 20 bp, Artificial Sequence
  Synthetic
gtgacccccagaagcaaggc

SEQ ID NO: 2203 - DNA, 20 bp, Artificial Sequence
  Synthetic
tgtgacccccagaagcaagg

SEQ ID NO: 2204 - DNA, 20 bp, Artificial Sequence
  Synthetic
ctgtgacccccagaagcaag

SEQ ID NO: 2205 - DNA, 20 bp, Artificial Sequence
  Synthetic
tctgtgacccccagaagcaa

SEQ ID NO: 2206 - DNA, 20 bp, Artificial Sequence
  Synthetic
ctctgtgacccccagaagca

SEQ ID NO: 2207 - DNA, 20 bp, Artificial Sequence
  Synthetic
gctctgtgacccccagaagc

SEQ ID NO: 2208 - DNA, 20 bp, Artificial Sequence
  Synthetic
tgctctgtgacccccagaag

SEQ ID NO: 2209 - DNA, 20 bp, Artificial Sequence
  Synthetic
atgctctgtgacccccagaa

SEQ ID NO: 2210 - DNA, 20 bp, Artificial Sequence
  Synthetic
catgctctgtgacccccaga

SEQ ID NO: 2211 - DNA, 20 bp, Artificial Sequence
  Synthetic
acatgctctgtgacccccag

SEQ ID NO: 2212 - DNA, 20 bp, Artificial Sequence
  Synthetic
aacatgctctgtgaccccca

SEQ ID NO: 2213 - DNA, 20 bp, Artificial Sequence
  Synthetic
cgagaacatgctctgtgacc

SEQ ID NO: 2214 - DNA, 20 bp, Artificial Sequence
  Synthetic
gcgagaacatgctctgtgac

SEQ ID NO: 2215 - DNA, 20 bp, Artificial Sequence
  Synthetic
ggcgagaacatgctctgtga

SEQ ID NO: 2216 - DNA, 20 bp, Artificial Sequence
  Synthetic
tggcgagaacatgctctgtg

SEQ ID NO: 2217 - DNA, 20 bp, Artificial Sequence
  Synthetic
ttggcgagaacatgctctgt

SEQ ID NO: 2218 - DNA, 20 bp, Artificial Sequence
  Synthetic
gttggcgagaacatgctctg

SEQ ID NO: 2219 - DNA, 20 bp, Artificial Sequence
  Synthetic
tgttggcgagaacatgctct

SEQ ID NO: 2220 - DNA, 20 bp, Artificial Sequence
  Synthetic
ttgttggcgagaacatgctc

SEQ ID NO: 2221 - DNA, 20 bp, Artificial Sequence
  Synthetic
attgttggcgagaacatgct

SEQ ID NO: 2222 - DNA, 20 bp, Artificial Sequence
  Synthetic
cattgttggcgagaacatgc

SEQ ID NO: 2223 - DNA, 20 bp, Artificial Sequence
  Synthetic
tcattgttggcgagaacatg

SEQ ID NO: 2224 - DNA, 20 bp, Artificial Sequence
  Synthetic
atcattgttggcgagaacat

SEQ ID NO: 2225 - DNA, 20 bp, Artificial Sequence
  Synthetic
catcattgttggcgagaaca

SEQ ID NO: 2226 - DNA, 20 bp, Artificial Sequence
  Synthetic
acatcattgttggcgagaac

SEQ ID NO: 2227 - DNA, 20 bp, Artificial Sequence
  Synthetic
aacatcattgttggcgagaa

SEQ ID NO: 2228 - DNA, 20 bp, Artificial Sequence
  Synthetic
aggaaacatcattgttggcg

SEQ ID NO: 2229 - DNA, 20 bp, Artificial Sequence
  Synthetic
caggaaacatcattgttggc

SEQ ID NO: 2230 - DNA, 20 bp, Artificial Sequence
  Synthetic
acaggaaacatcattgttgg

SEQ ID NO: 2231 - DNA, 20 bp, Artificial Sequence
  Synthetic
cacaggaaacatcattgttg

SEQ ID NO: 2232 - DNA, 20 bp, Artificial Sequence
  Synthetic
tcacaggaaacatcattgtt

SEQ ID NO: 2233 - DNA, 20 bp, Artificial Sequence
  Synthetic
gtcacaggaaacatcattgt

SEQ ID NO: 2234 - DNA, 20 bp, Artificial Sequence
  Synthetic
ggtcacaggaaacatcattg

SEQ ID NO: 2235 - DNA, 20 bp, Artificial Sequence
  Synthetic
tggtcacaggaaacatcatt

SEQ ID NO: 2236 - DNA, 20 bp, Artificial Sequence
  Synthetic
gtggtcacaggaaacatcat

SEQ ID NO: 2237 - DNA, 20 bp, Artificial Sequence
  Synthetic
ggtggtcacaggaaacatca

SEQ ID NO: 2238 - DNA, 20 bp, Artificial Sequence
  Synthetic
gggtggtcacaggaaacatc

SEQ ID NO: 2239 - DNA, 20 bp, Artificial Sequence
  Synthetic
ggggtggtcacaggaaacat

SEQ ID NO: 2240 - DNA, 20 bp, Artificial Sequence
  Synthetic
tagaggggtggtcacaggaa

SEQ ID NO: 2241 - DNA, 20 bp, Artificial Sequence
  Synthetic
ttagaggggtggtcacagga

SEQ ID NO: 2242 - DNA, 20 bp, Artificial Sequence
  Synthetic
gttagaggggtggtcacagg

SEQ ID NO: 2243 - DNA, 20 bp, Artificial Sequence
  Synthetic
tgttagaggggtggtcacag

SEQ ID NO: 2244 - DNA, 20 bp, Artificial Sequence
  Synthetic
gtgttagaggggtggtcaca

SEQ ID NO: 2245 - DNA, 20 bp, Artificial Sequence
  Synthetic
ggtgttagaggggtggtcac

SEQ ID NO: 2246 - DNA, 20 bp, Artificial Sequence
  Synthetic
cggtgttagaggggtggtca

SEQ ID NO: 2247 - DNA, 20 bp, Artificial Sequence
  Synthetic
acggtgttagaggggtggtc

SEQ ID NO: 2248 - DNA, 20 bp, Artificial Sequence
  Synthetic
cacggtgttagaggggtggt

SEQ ID NO: 2249 - DNA, 20 bp, Artificial Sequence
  Synthetic
gcacggtgttagaggggtgg

SEQ ID NO: 2250 - DNA, 20 bp, Artificial Sequence
  Synthetic
ggcacggtgttagaggggtg

SEQ ID NO: 2251 - DNA, 20 bp, Artificial Sequence
  Synthetic
gggcacggtgttagaggggt

SEQ ID NO: 2252 - DNA, 20 bp, Artificial Sequence
  Synthetic
cagagggcacggtgttagag

SEQ ID NO: 2253 - DNA, 20 bp, Artificial Sequence
  Synthetic
ccagagggcacggtgttaga

SEQ ID NO: 2254 - DNA, 20 bp, Artificial Sequence
  Synthetic
cccagagggcacggtgttag

SEQ ID NO: 2255 - DNA, 20 bp, Artificial Sequence
  Synthetic
tcccagagggcacggtgtta

SEQ ID NO: 2256 - DNA, 20 bp, Artificial Sequence
  Synthetic
ctcccagagggcacggtgtt

SEQ ID NO: 2257 - DNA, 20 bp, Artificial Sequence
  Synthetic
gctcccagagggcacggtgt

SEQ ID NO: 2258 - DNA, 20 bp, Artificial Sequence
  Synthetic
tgctcccagagggcacggtg

SEQ ID NO: 2259 - DNA, 20 bp, Artificial Sequence
  Synthetic
ttgctcccagagggcacggt

SEQ ID NO: 2260 - DNA, 20 bp, Artificial Sequence
  Synthetic
gttgctcccagagggcacgg

SEQ ID NO: 2261 - DNA, 20 bp, Artificial Sequence
  Synthetic
ggttgctcccagagggcacg

SEQ ID NO: 2262 - DNA, 20 bp, Artificial Sequence
  Synthetic
tggttgctcccagagggcac

SEQ ID NO: 2263 - DNA, 20 bp, Artificial Sequence
  Synthetic
ctggttgctcccagagggca

SEQ ID NO: 2264 - DNA, 20 bp, Artificial Sequence
  Synthetic
cctggttgctcccagagggc

SEQ ID NO: 2265 - DNA, 20 bp, Artificial Sequence
  Synthetic
tcctggttgctcccagaggg

SEQ ID NO: 2266 - DNA, 20 bp, Artificial Sequence
  Synthetic
gtcctggttgctcccagagg

SEQ ID NO: 2267 - DNA, 20 bp, Artificial Sequence
  Synthetic
ggtcctggttgctcccagag

SEQ ID NO: 2268 - DNA, 20 bp, Artificial Sequence
  Synthetic
aggtcctggttgctcccaga

SEQ ID NO: 2269 - DNA, 20 bp, Artificial Sequence
  Synthetic
caggtcctggttgctcccag

SEQ ID NO: 2270 - DNA, 20 bp, Artificial Sequence
  Synthetic
ccaggtcctggttgctccca

SEQ ID NO: 2271 - DNA, 20 bp, Artificial Sequence
  Synthetic
cccaggtcctggttgctccc

SEQ ID NO: 2272 - DNA, 20 bp, Artificial Sequence
  Synthetic
tcccaggtcctggttgctcc

SEQ ID NO: 2273 - DNA, 20 bp, Artificial Sequence
  Synthetic
ctcccaggtcctggttgctc

SEQ ID NO: 2274 - DNA, 20 bp, Artificial Sequence
  Synthetic
gctcccaggtcctggttgct

SEQ ID NO: 2275 - DNA, 20 bp, Artificial Sequence
  Synthetic
agctcccaggtcctggttgc

SEQ ID NO: 2276 - DNA, 20 bp, Artificial Sequence
  Synthetic
cagctcccaggtcctggttg

SEQ ID NO: 2277 - DNA, 20 bp, Artificial Sequence
  Synthetic
ccagctcccaggtcctggtt

SEQ ID NO: 2278 - DNA, 20 bp, Artificial Sequence
  Synthetic
cccagctcccaggtcctggt

SEQ ID NO: 2279 - DNA, 20 bp, Artificial Sequence
  Synthetic
ccccagctcccaggtcctgg

SEQ ID NO: 2280 - DNA, 20 bp, Artificial Sequence
  Synthetic
gccccagctcccaggtcctg

SEQ ID NO: 2281 - DNA, 20 bp, Artificial Sequence
  Synthetic
ggccccagctcccaggtcct

SEQ ID NO: 2282 - DNA, 20 bp, Artificial Sequence
  Synthetic
cggccccagctcccaggtcc

SEQ ID NO: 2283 - DNA, 20 bp, Artificial Sequence
  Synthetic
ccggccccagctcccaggtc

SEQ ID NO: 2284 - DNA, 20 bp, Artificial Sequence
  Synthetic
cccggccccagctcccaggt

SEQ ID NO: 2285 - DNA, 20 bp, Artificial Sequence
  Synthetic
tccccggccccagctcccag

SEQ ID NO: 2286 - DNA, 20 bp, Artificial Sequence
  Synthetic
ttccccggccccagctccca

SEQ ID NO: 2287 - DNA, 20 bp, Artificial Sequence
  Synthetic
cttccccggccccagctccc

SEQ ID NO: 2288 - DNA, 20 bp, Artificial Sequence
  Synthetic
tcttccccggccccagctcc

SEQ ID NO: 2289 - DNA, 20 bp, Artificial Sequence
  Synthetic
gtcttccccggccccagctc

SEQ ID NO: 2290 - DNA, 20 bp, Artificial Sequence
  Synthetic
cgtcttccccggccccagct

SEQ ID NO: 2291 - DNA, 20 bp, Artificial Sequence
  Synthetic
gcgtcttccccggccccagc

SEQ ID NO: 2292 - DNA, 20 bp, Artificial Sequence
  Synthetic
ggcgtcttccccggccccag

SEQ ID NO: 2293 - DNA, 20 bp, Artificial Sequence
  Synthetic
tccgaccgggcgtcttcccc

SEQ ID NO: 2294 - DNA, 20 bp, Artificial Sequence
  Synthetic
atccgaccgggcgtcttccc

SEQ ID NO: 2295 - DNA, 20 bp, Artificial Sequence
  Synthetic
catccgaccgggcgtcttcc

SEQ ID NO: 2296 - DNA, 20 bp, Artificial Sequence
  Synthetic
tcatccgaccgggcgtcttc

SEQ ID NO: 2297 - DNA, 20 bp, Artificial Sequence
  Synthetic
gtcatccgaccgggcgtctt

SEQ ID NO: 2298 - DNA, 20 bp, Artificial Sequence
  Synthetic
tgtcatccgaccgggcgtct

SEQ ID NO: 2299 - DNA, 20 bp, Artificial Sequence
  Synthetic
ctgtcatccgaccgggcgtc

SEQ ID NO: 2300 - DNA, 20 bp, Artificial Sequence
  Synthetic
gctgtcatccgaccgggcgt

SEQ ID NO: 2301 - DNA, 20 bp, Artificial Sequence
  Synthetic
tgctgtcatccgaccgggcg

SEQ ID NO: 2302 - DNA, 20 bp, Artificial Sequence
  Synthetic
ctgctgtcatccgaccgggc

SEQ ID NO: 2303 - DNA, 20 bp, Artificial Sequence
  Synthetic
gctgctgtcatccgaccggg

SEQ ID NO: 2304 - DNA, 20 bp, Artificial Sequence
  Synthetic
tgctgctgtcatccgaccgg

SEQ ID NO: 2305 - DNA, 20 bp, Artificial Sequence
  Synthetic
ctgctgctgtcatccgaccg

SEQ ID NO: 2306 - DNA, 20 bp, Artificial Sequence
  Synthetic
gctgctgctgtcatccgacc

SEQ ID NO: 2307 - DNA, 20 bp, Artificial Sequence
  Synthetic
ggctgctgctgtcatccgac

SEQ ID NO: 2308 - DNA, 20 bp, Artificial Sequence
  Synthetic
cggctgctgctgtcatccga

SEQ ID NO: 2309 - DNA, 20 bp, Artificial Sequence
  Synthetic
gcggctgctgctgtcatccg

SEQ ID NO: 2310 - DNA, 20 bp, Artificial Sequence
  Synthetic
tgcggctgctgctgtcatcc

SEQ ID NO: 2311 - DNA, 20 bp, Artificial Sequence
  Synthetic
atgcggctgctgctgtcatc

SEQ ID NO: 2312 - DNA, 20 bp, Artificial Sequence
  Synthetic
gatgcggctgctgctgtcat

SEQ ID NO: 2313 - DNA, 20 bp, Artificial Sequence
  Synthetic
tgatgcggctgctgctgtca

SEQ ID NO: 2314 - DNA, 20 bp, Artificial Sequence
  Synthetic
atgatgcggctgctgctgtc

SEQ ID NO: 2315 - DNA, 20 bp, Artificial Sequence
  Synthetic
gatgatgcggctgctgctgt

SEQ ID NO: 2316 - DNA, 20 bp, Artificial Sequence
  Synthetic
tgatgatgcggctgctgctg

SEQ ID NO: 2317 - DNA, 20 bp, Artificial Sequence
  Synthetic
ttgatgatgcggctgctgct

SEQ ID NO: 2318 - DNA, 20 bp, Artificial Sequence
  Synthetic
attgatgatgcggctgctgc

SEQ ID NO: 2319 - DNA, 20 bp, Artificial Sequence
  Synthetic
cattgatgatgcggctgctg

SEQ ID NO: 2320 - DNA, 20 bp, Artificial Sequence
  Synthetic
ccattgatgatgcggctgct

SEQ ID NO: 2321 - DNA, 20 bp, Artificial Sequence
  Synthetic
tccattgatgatgcggctgc

SEQ ID NO: 2322 - DNA, 20 bp, Artificial Sequence
  Synthetic
atccattgatgatgcggctg

SEQ ID NO: 2323 - DNA, 20 bp, Artificial Sequence
  Synthetic
gatccattgatgatgcggct

SEQ ID NO: 2324 - DNA, 20 bp, Artificial Sequence
  Synthetic
ggatccattgatgatgcggc

SEQ ID NO: 2325 - DNA, 20 bp, Artificial Sequence
  Synthetic
cggatccattgatgatgcgg

SEQ ID NO: 2326 - DNA, 20 bp, Artificial Sequence
  Synthetic
tcggatccattgatgatgcg

SEQ ID NO: 2327 - DNA, 20 bp, Artificial Sequence
  Synthetic
gtcggatccattgatgatgc

SEQ ID NO: 2328 - DNA, 20 bp, Artificial Sequence
  Synthetic
agtcggatccattgatgatg

SEQ ID NO: 2329 - DNA, 20 bp, Artificial Sequence
  Synthetic
cagtcggatccattgatgat

SEQ ID NO: 2330 - DNA, 20 bp, Artificial Sequence
  Synthetic
gcagtcggatccattgatga

SEQ ID NO: 2331 - DNA, 20 bp, Artificial Sequence
  Synthetic
cgcagtcggatccattgatg

SEQ ID NO: 2332 - DNA, 20 bp, Artificial Sequence
  Synthetic
tcgcagtcggatccattgat

SEQ ID NO: 2333 - DNA, 20 bp, Artificial Sequence
  Synthetic
atcgcagtcggatccattga

SEQ ID NO: 2334 - DNA, 20 bp, Artificial Sequence
  Synthetic
tatcgcagtcggatccattg

SEQ ID NO: 2335 - DNA, 20 bp, Artificial Sequence
  Synthetic
atatcgcagtcggatccatt

SEQ ID NO: 2336 - DNA, 20 bp, Artificial Sequence
  Synthetic
catatcgcagtcggatccat

SEQ ID NO: 2337 - DNA, 20 bp, Artificial Sequence
  Synthetic
gcatatcgcagtcggatcca

SEQ ID NO: 2338 - DNA, 20 bp, Artificial Sequence
  Synthetic
tgcatatcgcagtcggatcc

SEQ ID NO: 2339 - DNA, 20 bp, Artificial Sequence
  Synthetic
gtgcatatcgcagtcggatc

SEQ ID NO: 2340 - DNA, 20 bp, Artificial Sequence
  Synthetic
tgtgcatatcgcagtcggat

SEQ ID NO: 2341 - DNA, 20 bp, Artificial Sequence
  Synthetic
gtgtgcatatcgcagtcgga

SEQ ID NO: 2342 - DNA, 20 bp, Artificial Sequence
  Synthetic
ggtgtgcatatcgcagtcgg

SEQ ID NO: 2343 - DNA, 20 bp, Artificial Sequence
  Synthetic
gggtgtgcatatcgcagtcg

SEQ ID NO: 2344 - DNA, 20 bp, Artificial Sequence
  Synthetic
tgggtgtgcatatcgcagtc

SEQ ID NO: 2345 - DNA, 20 bp, Artificial Sequence
  Synthetic
ctgggtgtgcatatcgcagt

SEQ ID NO: 2346 - DNA, 20 bp, Artificial Sequence
  Synthetic
gctgggtgtgcatatcgcag

SEQ ID NO: 2347 - DNA, 20 bp, Artificial Sequence
  Synthetic
ggctgggtgtgcatatcgca

SEQ ID NO: 2348 - DNA, 20 bp, Artificial Sequence
  Synthetic
cggctgggtgtgcatatcgc

SEQ ID NO: 2349 - DNA, 20 bp, Artificial Sequence
  Synthetic
acggctgggtgtgcatatcg

SEQ ID NO: 2350 - DNA, 20 bp, Artificial Sequence
  Synthetic
cacggctgggtgtgcatatc

SEQ ID NO: 2351 - DNA, 20 bp, Artificial Sequence
  Synthetic
ccacggctgggtgtgcatat

SEQ ID NO: 2352 - DNA, 20 bp, Artificial Sequence
  Synthetic
gccacggctgggtgtgcata

SEQ ID NO: 2353 - DNA, 20 bp, Artificial Sequence
  Synthetic
tgccacggctgggtgtgcat

SEQ ID NO: 2354 - DNA, 20 bp, Artificial Sequence
  Synthetic
ctgccacggctgggtgtgca

SEQ ID NO: 2355 - DNA, 20 bp, Artificial Sequence
  Synthetic
cctgccacggctgggtgtgc

SEQ ID NO: 2356 - DNA, 20 bp, Artificial Sequence
  Synthetic
gcctgccacggctgggtgtg

SEQ ID NO: 2357 - DNA, 20 bp, Artificial Sequence
  Synthetic
ggcctgccacggctgggtgt

SEQ ID NO: 2358 - DNA, 20 bp, Artificial Sequence
  Synthetic
cggcctgccacggctgggtg

SEQ ID NO: 2359 - DNA, 20 bp, Artificial Sequence
  Synthetic
gcggcctgccacggctgggt

SEQ ID NO: 2360 - DNA, 20 bp, Artificial Sequence
  Synthetic
cgcggcctgccacggctggg

SEQ ID NO: 2361 - DNA, 20 bp, Artificial Sequence
  Synthetic
gcgcggcctgccacggctgg

SEQ ID NO: 2362 - DNA, 20 bp, Artificial Sequence
  Synthetic
agcgcggcctgccacggctg

SEQ ID NO: 2363 - DNA, 20 bp, Artificial Sequence
  Synthetic
cagcgcggcctgccacggct

SEQ ID NO: 2364 - DNA, 20 bp, Artificial Sequence
  Synthetic
agcaacagcgcggcctgcca

SEQ ID NO: 2365 - DNA, 20 bp, Artificial Sequence
  Synthetic
tagcaacagcgcggcctgcc

SEQ ID NO: 2366 - DNA, 20 bp, Artificial Sequence
  Synthetic
ttagcaacagcgcggcctgc

SEQ ID NO: 2367 - DNA, 20 bp, Artificial Sequence
  Synthetic
cttagcaacagcgcggcctg

SEQ ID NO: 2368 - DNA, 20 bp, Artificial Sequence
  Synthetic
ccttagcaacagcgcggcct

SEQ ID NO: 2369 - DNA, 20 bp, Artificial Sequence
  Synthetic
gccttagcaacagcgcggcc

SEQ ID NO: 2370 - DNA, 20 bp, Artificial Sequence
  Synthetic
ggccttagcaacagcgcggc

SEQ ID NO: 2371 - DNA, 20 bp, Artificial Sequence
  Synthetic
tgggccttagcaacagcgcg

SEQ ID NO: 2372 - DNA, 20 bp, Artificial Sequence
  Synthetic
ttgggccttagcaacagcgc

SEQ ID NO: 2373 - DNA, 20 bp, Artificial Sequence
  Synthetic
gttgggccttagcaacagcg

SEQ ID NO: 2374 - DNA, 20 bp, Artificial Sequence
  Synthetic
ggttgggccttagcaacagc

SEQ ID NO: 2375 - DNA, 20 bp, Artificial Sequence
  Synthetic
tggttgggccttagcaacag

SEQ ID NO: 2376 - DNA, 20 bp, Artificial Sequence
  Synthetic
ctggttgggccttagcaaca

SEQ ID NO: 2377 - DNA, 20 bp, Artificial Sequence
  Synthetic
gctggttgggccttagcaac

SEQ ID NO: 2378 - DNA, 20 bp, Artificial Sequence
  Synthetic
agctggttgggccttagcaa

SEQ ID NO: 2379 - DNA, 20 bp, Artificial Sequence
  Synthetic
gagctggttgggccttagca

SEQ ID NO: 2380 - DNA, 20 bp, Artificial Sequence
  Synthetic
agagctggttgggccttagc

SEQ ID NO: 2381 - DNA, 20 bp, Artificial Sequence
  Synthetic
tagagctggttgggccttag

SEQ ID NO: 2382 - DNA, 20 bp, Artificial Sequence
  Synthetic
gtagagctggttgggcctta

SEQ ID NO: 2383 - DNA, 20 bp, Artificial Sequence
  Synthetic
agtagagctggttgggcctt

SEQ ID NO: 2384 - DNA, 20 bp, Artificial Sequence
  Synthetic
cagtagagctggttgggcct

SEQ ID NO: 2385 - DNA, 20 bp, Artificial Sequence
  Synthetic
gcagtagagctggttgggcc

SEQ ID NO: 2386 - DNA, 20 bp, Artificial Sequence
  Synthetic
cgcagtagagctggttgggc

SEQ ID NO: 2387 - DNA, 20 bp, Artificial Sequence
  Synthetic
ccgcagtagagctggttggg

SEQ ID NO: 2388 - DNA, 20 bp, Artificial Sequence
  Synthetic
cccgcagtagagctggttgg

SEQ ID NO: 2389 - DNA, 20 bp, Artificial Sequence
  Synthetic
ccccgcagtagagctggttg

SEQ ID NO: 2390 - DNA, 20 bp, Artificial Sequence
  Synthetic
gccccgcagtagagctggtt

SEQ ID NO: 2391 - DNA, 20 bp, Artificial Sequence
  Synthetic
cgccccgcagtagagctggt

SEQ ID NO: 2392 - DNA, 20 bp, Artificial Sequence
  Synthetic
ccgccccgcagtagagctgg

SEQ ID NO: 2393 - DNA, 20 bp, Artificial Sequence
  Synthetic
accgccccgcagtagagctg

SEQ ID NO: 2394 - DNA, 20 bp, Artificial Sequence
  Synthetic
caccgccccgcagtagagct

SEQ ID NO: 2395 - DNA, 20 bp, Artificial Sequence
  Synthetic
aacaccgccccgcagtagag

SEQ ID NO: 2396 - DNA, 20 bp, Artificial Sequence
  Synthetic
caacaccgccccgcagtaga

SEQ ID NO: 2397 - DNA, 20 bp, Artificial Sequence
  Synthetic
ccaacaccgccccgcagtag

SEQ ID NO: 2398 - DNA, 20 bp, Artificial Sequence
  Synthetic
accaacaccgccccgcagta

SEQ ID NO: 2399 - DNA, 20 bp, Artificial Sequence
  Synthetic
caccaacaccgccccgcagt

SEQ ID NO: 2400 - DNA, 20 bp, Artificial Sequence
  Synthetic
tgcaccaacaccgccccgca

SEQ ID NO: 2401 - DNA, 20 bp, Artificial Sequence
  Synthetic
atgcaccaacaccgccccgc

SEQ ID NO: 2402 - DNA, 20 bp, Artificial Sequence
  Synthetic
gatgcaccaacaccgccccg

SEQ ID NO: 2403 - DNA, 20 bp, Artificial Sequence
  Synthetic
ggatgcaccaacaccgcccc

SEQ ID NO: 2404 - DNA, 20 bp, Artificial Sequence
  Synthetic
tggatgcaccaacaccgccc

SEQ ID NO: 2405 - DNA, 20 bp, Artificial Sequence
  Synthetic
gtggatgcaccaacaccgcc

SEQ ID NO: 2406 - DNA, 20 bp, Artificial Sequence
  Synthetic
tgtggatgcaccaacaccgc

SEQ ID NO: 2407 - DNA, 20 bp, Artificial Sequence
  Synthetic
ctgtggatgcaccaacaccg

SEQ ID NO: 2408 - DNA, 20 bp, Artificial Sequence
  Synthetic
actgtggatgcaccaacacc

SEQ ID NO: 2409 - DNA, 20 bp, Artificial Sequence
  Synthetic
cactgtggatgcaccaacac

SEQ ID NO: 2410 - DNA, 20 bp, Artificial Sequence
  Synthetic
ccactgtggatgcaccaaca

SEQ ID NO: 2411 - DNA, 20 bp, Artificial Sequence
  Synthetic
agcagccactgtggatgcac

SEQ ID NO: 2412 - DNA, 20 bp, Artificial Sequence
  Synthetic
gagcagccactgtggatgca

SEQ ID NO: 2413 - DNA, 20 bp, Artificial Sequence
  Synthetic
tgagcagccactgtggatgc

SEQ ID NO: 2414 - DNA, 20 bp, Artificial Sequence
  Synthetic
gtgagcagccactgtggatg

SEQ ID NO: 2415 - DNA, 20 bp, Artificial Sequence
  Synthetic
cgtgagcagccactgtggat

SEQ ID NO: 2416 - DNA, 20 bp, Artificial Sequence
  Synthetic
ccgtgagcagccactgtgga

SEQ ID NO: 2417 - DNA, 20 bp, Artificial Sequence
  Synthetic
gccgtgagcagccactgtgg

SEQ ID NO: 2418 - DNA, 20 bp, Artificial Sequence
  Synthetic
ggccgtgagcagccactgtg

SEQ ID NO: 2419 - DNA, 20 bp, Artificial Sequence
  Synthetic
cggccgtgagcagccactgt

SEQ ID NO: 2420 - DNA, 20 bp, Artificial Sequence
  Synthetic
gcggccgtgagcagccactg

SEQ ID NO: 2421 - DNA, 20 bp, Artificial Sequence
  Synthetic
ggcggccgtgagcagccact

SEQ ID NO: 2422 - DNA, 20 bp, Artificial Sequence
  Synthetic
tgggcggccgtgagcagcca

SEQ ID NO: 2423 - DNA, 20 bp, Artificial Sequence
  Synthetic
gtgggcggccgtgagcagcc

SEQ ID NO: 2424 - DNA, 20 bp, Artificial Sequence
  Synthetic
agtgggcggccgtgagcagc

SEQ ID NO: 2425 - DNA, 20 bp, Artificial Sequence
  Synthetic
cagtgggcggccgtgagcag

SEQ ID NO: 2426 - DNA, 20 bp, Artificial Sequence
  Synthetic
gcagtgggcggccgtgagca

SEQ ID NO: 2427 - DNA, 20 bp, Artificial Sequence
  Synthetic
tgcagtgggcggccgtgagc

SEQ ID NO: 2428 - DNA, 20 bp, Artificial Sequence
  Synthetic
ctgcagtgggcggccgtgag

SEQ ID NO: 2429 - DNA, 20 bp, Artificial Sequence
  Synthetic
cctgcagtgggcggccgtga

SEQ ID NO: 2430 - DNA, 20 bp, Artificial Sequence
  Synthetic
tcctgcagtgggcggccgtg

SEQ ID NO: 2431 - DNA, 20 bp, Artificial Sequence
  Synthetic
ttcctgcagtgggcggccgt

SEQ ID NO: 2432 - DNA, 20 bp, Artificial Sequence
  Synthetic
cttcctgcagtgggcggccg

SEQ ID NO: 2433 - DNA, 20 bp, Artificial Sequence
  Synthetic
tcttcctgcagtgggcggcc

SEQ ID NO: 2434 - DNA, 20 bp, Artificial Sequence
  Synthetic
ttcttcctgcagtgggcggc

SEQ ID NO: 2435 - DNA, 20 bp, Artificial Sequence
  Synthetic
tttcttcctgcagtgggcgg

SEQ ID NO: 2436 - DNA, 20 bp, Artificial Sequence
  Synthetic
ctttcttcctgcagtgggcg

SEQ ID NO: 2437 - DNA, 20 bp, Artificial Sequence
  Synthetic
actttcttcctgcagtgggc

SEQ ID NO: 2438 - DNA, 20 bp, Artificial Sequence
  Synthetic
aactttcttcctgcagtggg

SEQ ID NO: 2439 - DNA, 20 bp, Artificial Sequence
  Synthetic
aaactttcttcctgcagtgg

SEQ ID NO: 2440 - DNA, 20 bp, Artificial Sequence
  Synthetic
aaaactttcttcctgcagtg

SEQ ID NO: 2441 - DNA, 20 bp, Artificial Sequence
  Synthetic
gaaaactttcttcctgcagt

SEQ ID NO: 2442 - DNA, 20 bp, Artificial Sequence
  Synthetic
tgaaaactttcttcctgcag

SEQ ID NO: 2443 - DNA, 20 bp, Artificial Sequence
  Synthetic
ctgaaaactttcttcctgca

SEQ ID NO: 2444 - DNA, 20 bp, Artificial Sequence
  Synthetic
tctgaaaactttcttcctgc

SEQ ID NO: 2445 - DNA, 20 bp, Artificial Sequence
  Synthetic
ctctgaaaactttcttcctg

SEQ ID NO: 2446 - DNA, 20 bp, Artificial Sequence
  Synthetic
actctgaaaactttcttcct

SEQ ID NO: 2447 - DNA, 20 bp, Artificial Sequence
  Synthetic
gactctgaaaactttcttcc

SEQ ID NO: 2448 - DNA, 20 bp, Artificial Sequence
  Synthetic
ggactctgaaaactttcttc

SEQ ID NO: 2449 - DNA, 20 bp, Artificial Sequence
  Synthetic
cggactctgaaaactttctt

SEQ ID NO: 2450 - DNA, 20 bp, Artificial Sequence
  Synthetic
acggactctgaaaactttct

SEQ ID NO: 2451 - DNA, 20 bp, Artificial Sequence
  Synthetic
gacggactctgaaaactttc

SEQ ID NO: 2452 - DNA, 20 bp, Artificial Sequence
  Synthetic
agacggactctgaaaacttt

SEQ ID NO: 2453 - DNA, 20 bp, Artificial Sequence
  Synthetic
gagacggactctgaaaactt

SEQ ID NO: 2454 - DNA, 20 bp, Artificial Sequence
  Synthetic
cgagacggactctgaaaact

SEQ ID NO: 2455 - DNA, 20 bp, Artificial Sequence
  Synthetic
ggccgagacggactctgaaa

SEQ ID NO: 2456 - DNA, 20 bp, Artificial Sequence
  Synthetic
tggccgagacggactctgaa

SEQ ID NO: 2457 - DNA, 20 bp, Artificial Sequence
  Synthetic
gtggccgagacggactctga

SEQ ID NO: 2458 - DNA, 20 bp, Artificial Sequence
  Synthetic
agtggccgagacggactctg

SEQ ID NO: 2459 - DNA, 20 bp, Artificial Sequence
  Synthetic
tagtggccgagacggactct

SEQ ID NO: 2460 - DNA, 20 bp, Artificial Sequence
  Synthetic
gtagtggccgagacggactc

SEQ ID NO: 2461 - DNA, 20 bp, Artificial Sequence
  Synthetic
agtagtggccgagacggact

SEQ ID NO: 2462 - DNA, 20 bp, Artificial Sequence
  Synthetic
gagtagtggccgagacggac

SEQ ID NO: 2463 - DNA, 20 bp, Artificial Sequence
  Synthetic
ggagtagtggccgagacgga

SEQ ID NO: 2464 - DNA, 20 bp, Artificial Sequence
  Synthetic
tgacagggagtagtggccga

SEQ ID NO: 2465 - DNA, 20 bp, Artificial Sequence
  Synthetic
gtgacagggagtagtggccg

SEQ ID NO: 2466 - DNA, 20 bp, Artificial Sequence
  Synthetic
ggtgacagggagtagtggcc

SEQ ID NO: 2467 - DNA, 20 bp, Artificial Sequence
  Synthetic
tggtgacagggagtagtggc

SEQ ID NO: 2468 - DNA, 20 bp, Artificial Sequence
  Synthetic
ctggtgacagggagtagtgg

SEQ ID NO: 2469 - DNA, 20 bp, Artificial Sequence
  Synthetic
actggtgacagggagtagtg

SEQ ID NO: 2470 - DNA, 20 bp, Artificial Sequence
  Synthetic
aactggtgacagggagtagt

SEQ ID NO: 2471 - DNA, 20 bp, Artificial Sequence
  Synthetic
aaactggtgacagggagtag

SEQ ID NO: 2472 - DNA, 20 bp, Artificial Sequence
  Synthetic
taaactggtgacagggagta

SEQ ID NO: 2473 - DNA, 20 bp, Artificial Sequence
  Synthetic
ataaactggtgacagggagt

SEQ ID NO: 2474 - DNA, 20 bp, Artificial Sequence
  Synthetic
cataaactggtgacagggag

SEQ ID NO: 2475 - DNA, 20 bp, Artificial Sequence
  Synthetic
tcataaactggtgacaggga

SEQ ID NO: 2476 - DNA, 20 bp, Artificial Sequence
  Synthetic
ttcataaactggtgacaggg

SEQ ID NO: 2477 - DNA, 20 bp, Artificial Sequence
  Synthetic
attcataaactggtgacagg

SEQ ID NO: 2478 - DNA, 20 bp, Artificial Sequence
  Synthetic
gattcataaactggtgacag

SEQ ID NO: 2479 - DNA, 20 bp, Artificial Sequence
  Synthetic
agattcataaactggtgaca

SEQ ID NO: 2480 - DNA, 20 bp, Artificial Sequence
  Synthetic
cagattcataaactggtgac

SEQ ID NO: 2481 - DNA, 20 bp, Artificial Sequence
  Synthetic
ccagattcataaactggtga

SEQ ID NO: 2482 - DNA, 20 bp, Artificial Sequence
  Synthetic
cccagattcataaactggtg

SEQ ID NO: 2483 - DNA, 20 bp, Artificial Sequence
  Synthetic
gcccagattcataaactggt

SEQ ID NO: 2484 - DNA, 20 bp, Artificial Sequence
  Synthetic
tgcccagattcataaactgg

SEQ ID NO: 2485 - DNA, 20 bp, Artificial Sequence
  Synthetic
ctgcccagattcataaactg

SEQ ID NO: 2486 - DNA, 20 bp, Artificial Sequence
  Synthetic
gctgcccagattcataaact

SEQ ID NO: 2487 - DNA, 20 bp, Artificial Sequence
  Synthetic
tgctgcccagattcataaac

SEQ ID NO: 2488 - DNA, 20 bp, Artificial Sequence
  Synthetic
ctgctgcccagattcataaa

SEQ ID NO: 2489 - DNA, 20 bp, Artificial Sequence
  Synthetic
tctgctgcccagattcataa

SEQ ID NO: 2490 - DNA, 20 bp, Artificial Sequence
  Synthetic
atctgctgcccagattcata

SEQ ID NO: 2491 - DNA, 20 bp, Artificial Sequence
  Synthetic
catctgctgcccagattcat

SEQ ID NO: 2492 - DNA, 20 bp, Artificial Sequence
  Synthetic
acatctgctgcccagattca

SEQ ID NO: 2493 - DNA, 20 bp, Artificial Sequence
  Synthetic
aacatctgctgcccagattc

SEQ ID NO: 2494 - DNA, 20 bp, Artificial Sequence
  Synthetic
gaacatctgctgcccagatt

SEQ ID NO: 2495 - DNA, 20 bp, Artificial Sequence
  Synthetic
ggaacatctgctgcccagat

SEQ ID NO: 2496 - DNA, 20 bp, Artificial Sequence
  Synthetic
tggaacatctgctgcccaga

SEQ ID NO: 2497 - DNA, 20 bp, Artificial Sequence
  Synthetic
ctggaacatctgctgcccag

SEQ ID NO: 2498 - DNA, 20 bp, Artificial Sequence
  Synthetic
cctggaacatctgctgccca

SEQ ID NO: 2499 - DNA, 20 bp, Artificial Sequence
  Synthetic
ccctggaacatctgctgccc

SEQ ID NO: 2500 - DNA, 20 bp, Artificial Sequence
  Synthetic
cccctggaacatctgctgcc

SEQ ID NO: 2501 - DNA, 20 bp, Artificial Sequence
  Synthetic
ccccctggaacatctgctgc

SEQ ID NO: 2502 - DNA, 20 bp, Artificial Sequence
  Synthetic
accccctggaacatctgctg

SEQ ID NO: 2503 - DNA, 20 bp, Artificial Sequence
  Synthetic
gaccccctggaacatctgct

SEQ ID NO: 2504 - DNA, 20 bp, Artificial Sequence
  Synthetic
tgaccccctggaacatctgc

SEQ ID NO: 2505 - DNA, 20 bp, Artificial Sequence
  Synthetic
ttgaccccctggaacatctg

SEQ ID NO: 2506 - DNA, 20 bp, Artificial Sequence
  Synthetic
tttgaccccctggaacatct

SEQ ID NO: 2507 - DNA, 20 bp, Artificial Sequence
  Synthetic
atttgaccccctggaacatc

SEQ ID NO: 2508 - DNA, 20 bp, Artificial Sequence
  Synthetic
gatttgaccccctggaacat

SEQ ID NO: 2509 - DNA, 20 bp, Artificial Sequence
  Synthetic
ggatttgaccccctggaaca

SEQ ID NO: 2510 - DNA, 20 bp, Artificial Sequence
  Synthetic
tggatttgaccccctggaac

SEQ ID NO: 2511 - DNA, 20 bp, Artificial Sequence
  Synthetic
atggatttgaccccctggaa

SEQ ID NO: 2512 - DNA, 20 bp, Artificial Sequence
  Synthetic
gatggatttgaccccctgga

SEQ ID NO: 2513 - DNA, 20 bp, Artificial Sequence
  Synthetic
ggatggatttgaccccctgg

SEQ ID NO: 2514 - DNA, 20 bp, Artificial Sequence
  Synthetic
gggatggatttgaccccctg

SEQ ID NO: 2515 - DNA, 20 bp, Artificial Sequence
  Synthetic
ggggatggatttgaccccct

SEQ ID NO: 2516 - DNA, 20 bp, Artificial Sequence
  Synthetic
tgggggatggatttgacccc

SEQ ID NO: 2517 - DNA, 20 bp, Artificial Sequence
  Synthetic
gtgggggatggatttgaccc

SEQ ID NO: 2518 - DNA, 20 bp, Artificial Sequence
  Synthetic
ggtgggggatggatttgacc

SEQ ID NO: 2519 - DNA, 20 bp, Artificial Sequence
  Synthetic
gggtgggggatggatttgac

SEQ ID NO: 2520 - DNA, 20 bp, Artificial Sequence
  Synthetic
agggtgggggatggatttga

SEQ ID NO: 2521 - DNA, 20 bp, Artificial Sequence
  Synthetic
cagggtgggggatggatttg

SEQ ID NO: 2522 - DNA, 20 bp, Artificial Sequence
  Synthetic
ccagggtgggggatggattt

SEQ ID NO: 2523 - DNA, 20 bp, Artificial Sequence
  Synthetic
gccagggtgggggatggatt

SEQ ID NO: 2524 - DNA, 20 bp, Artificial Sequence
  Synthetic
agccagggtgggggatggat

SEQ ID NO: 2525 - DNA, 20 bp, Artificial Sequence
  Synthetic
tagccagggtgggggatgga

SEQ ID NO: 2526 - DNA, 20 bp, Artificial Sequence
  Synthetic
gtagccagggtgggggatgg

SEQ ID NO: 2527 - DNA, 20 bp, Artificial Sequence
  Synthetic
agtagccagggtgggggatg

SEQ ID NO: 2528 - DNA, 20 bp, Artificial Sequence
  Synthetic
gagtagccagggtgggggat

SEQ ID NO: 2529 - DNA, 20 bp, Artificial Sequence
  Synthetic
ggagtagccagggtggggga

SEQ ID NO: 2530 - DNA, 20 bp, Artificial Sequence
  Synthetic
tgggagtagccagggtgggg

SEQ ID NO: 2531 - DNA, 20 bp, Artificial Sequence
  Synthetic
gtgggagtagccagggtggg

SEQ ID NO: 2532 - DNA, 20 bp, Artificial Sequence
  Synthetic
ggtgggagtagccagggtgg

SEQ ID NO: 2533 - DNA, 20 bp, Artificial Sequence
  Synthetic
gggtgggagtagccagggtg

SEQ ID NO: 2534 - DNA, 20 bp, Artificial Sequence
  Synthetic
agggtgggagtagccagggt

SEQ ID NO: 2535 - DNA, 20 bp, Artificial Sequence
  Synthetic
tggccagggtgggagtagcc

SEQ ID NO: 2536 - DNA, 20 bp, Artificial Sequence
  Synthetic
gtggccagggtgggagtagc

SEQ ID NO: 2537 - DNA, 20 bp, Artificial Sequence
  Synthetic
agtggccagggtgggagtag

SEQ ID NO: 2538 - DNA, 20 bp, Artificial Sequence
  Synthetic
gagtggccagggtgggagta

SEQ ID NO: 2539 - DNA, 20 bp, Artificial Sequence
  Synthetic
agagtggccagggtgggagt

SEQ ID NO: 2540 - DNA, 20 bp, Artificial Sequence
  Synthetic
tagagtggccagggtgggag

SEQ ID NO: 2541 - DNA, 20 bp, Artificial Sequence
  Synthetic
ttagagtggccagggtggga

SEQ ID NO: 2542 - DNA, 20 bp, Artificial Sequence
  Synthetic
gttagagtggccagggtggg

SEQ ID NO: 2543 - DNA, 20 bp, Artificial Sequence
  Synthetic
cgttagagtggccagggtgg

SEQ ID NO: 2544 - DNA, 20 bp, Artificial Sequence
  Synthetic
tcgttagagtggccagggtg

SEQ ID NO: 2545 - DNA, 20 bp, Artificial Sequence
  Synthetic
gtcgttagagtggccagggt

SEQ ID NO: 2546 - DNA, 20 bp, Artificial Sequence
  Synthetic
ggtcgttagagtggccaggg

SEQ ID NO: 2547 - DNA, 20 bp, Artificial Sequence
  Synthetic
aggtcgttagagtggccagg

SEQ ID NO: 2548 - DNA, 20 bp, Artificial Sequence
  Synthetic
gaggtcgttagagtggccag

SEQ ID NO: 2549 - DNA, 20 bp, Artificial Sequence
  Synthetic
tgaggtcgttagagtggcca

SEQ ID NO: 2550 - DNA, 20 bp, Artificial Sequence
  Synthetic
atgaggtcgttagagtggcc

SEQ ID NO: 2551 - DNA, 20 bp, Artificial Sequence
  Synthetic
catgaggtcgttagagtggc

SEQ ID NO: 2552 - DNA, 20 bp, Artificial Sequence
  Synthetic
gcatgaggtcgttagagtgg

SEQ ID NO: 2553 - DNA, 20 bp, Artificial Sequence
  Synthetic
agcatgaggtcgttagagtg

SEQ ID NO: 2554 - DNA, 20 bp, Artificial Sequence
  Synthetic
gagcatgaggtcgttagagt

SEQ ID NO: 2555 - DNA, 20 bp, Artificial Sequence
  Synthetic
tgagcatgaggtcgttagag

SEQ ID NO: 2556 - DNA, 20 bp, Artificial Sequence
  Synthetic
atgagcatgaggtcgttaga

SEQ ID NO: 2557 - DNA, 20 bp, Artificial Sequence
  Synthetic
gatgagcatgaggtcgttag

SEQ ID NO: 2558 - DNA, 20 bp, Artificial Sequence
  Synthetic
tgatgagcatgaggtcgtta

SEQ ID NO: 2559 - DNA, 20 bp, Artificial Sequence
  Synthetic
ttgatgagcatgaggtcgtt

SEQ ID NO: 2560 - DNA, 20 bp, Artificial Sequence
  Synthetic
tttgatgagcatgaggtcgt

SEQ ID NO: 2561 - DNA, 20 bp, Artificial Sequence
  Synthetic
gtttgatgagcatgaggtcg

SEQ ID NO: 2562 - DNA, 20 bp, Artificial Sequence
  Synthetic
agtttgatgagcatgaggtc

SEQ ID NO: 2563 - DNA, 20 bp, Artificial Sequence
  Synthetic
cagtttgatgagcatgaggt

SEQ ID NO: 2564 - DNA, 20 bp, Artificial Sequence
  Synthetic
tcagtttgatgagcatgagg

SEQ ID NO: 2565 - DNA, 20 bp, Artificial Sequence
  Synthetic
ttcagtttgatgagcatgag

SEQ ID NO: 2566 - DNA, 20 bp, Artificial Sequence
  Synthetic
gttcagtttgatgagcatga

SEQ ID NO: 2567 - DNA, 20 bp, Artificial Sequence
  Synthetic
tgttcagtttgatgagcatg

SEQ ID NO: 2568 - DNA, 20 bp, Artificial Sequence
  Synthetic
ctgttcagtttgatgagcat

SEQ ID NO: 2569 - DNA, 20 bp, Artificial Sequence
  Synthetic
tctgttcagtttgatgagca

SEQ ID NO: 2570 - DNA, 20 bp, Artificial Sequence
  Synthetic
ttctgttcagtttgatgagc

SEQ ID NO: 2571 - DNA, 20 bp, Artificial Sequence
  Synthetic
cttctgttcagtttgatgag

SEQ ID NO: 2572 - DNA, 20 bp, Artificial Sequence
  Synthetic
tcttctgttcagtttgatga

SEQ ID NO: 2573 - DNA, 20 bp, Artificial Sequence
  Synthetic
ttcttctgttcagtttgatg

SEQ ID NO: 2574 - DNA, 20 bp, Artificial Sequence
  Synthetic
attcttctgttcagtttgat

SEQ ID NO: 2575 - DNA, 20 bp, Artificial Sequence
  Synthetic
aattcttctgttcagtttga

SEQ ID NO: 2576 - DNA, 20 bp, Artificial Sequence
  Synthetic
gaattcttctgttcagtttg

SEQ ID NO: 2577 - DNA, 20 bp, Artificial Sequence
  Synthetic
cgaattcttctgttcagttt

SEQ ID NO: 2578 - DNA, 20 bp, Artificial Sequence
  Synthetic
acgaattcttctgttcagtt

SEQ ID NO: 2579 - DNA, 20 bp, Artificial Sequence
  Synthetic
gacgaattcttctgttcagt

SEQ ID NO: 2580 - DNA, 20 bp, Artificial Sequence
  Synthetic
ggacgaattcttctgttcag

SEQ ID NO: 2581 - DNA, 20 bp, Artificial Sequence
  Synthetic
gggacgaattcttctgttca

SEQ ID NO: 2582 - DNA, 20 bp, Artificial Sequence
  Synthetic
tgggacgaattcttctgttc

SEQ ID NO: 2583 - DNA, 20 bp, Artificial Sequence
  Synthetic
gtgggacgaattcttctgtt

SEQ ID NO: 2584 - DNA, 20 bp, Artificial Sequence
  Synthetic
agtgggacgaattcttctgt

SEQ ID NO: 2585 - DNA, 20 bp, Artificial Sequence
  Synthetic
tagtgggacgaattcttctg

SEQ ID NO: 2586 - DNA, 20 bp, Artificial Sequence
  Synthetic
ttagtgggacgaattcttct

SEQ ID NO: 2587 - DNA, 20 bp, Artificial Sequence
  Synthetic
tttagtgggacgaattcttc

SEQ ID NO: 2588 - DNA, 20 bp, Artificial Sequence
  Synthetic
ctttagtgggacgaattctt

SEQ ID NO: 2589 - DNA, 20 bp, Artificial Sequence
  Synthetic
tctttagtgggacgaattct

SEQ ID NO: 2590 - DNA, 20 bp, Artificial Sequence
  Synthetic
atctttagtgggacgaattc

SEQ ID NO: 2591 - DNA, 20 bp, Artificial Sequence
  Synthetic
catctttagtgggacgaatt

SEQ ID NO: 2592 - DNA, 20 bp, Artificial Sequence
  Synthetic
acatctttagtgggacgaat

SEQ ID NO: 2593 - DNA, 20 bp, Artificial Sequence
  Synthetic
gacatctttagtgggacgaa

SEQ ID NO: 2594 - DNA, 20 bp, Artificial Sequence
  Synthetic
tgacatctttagtgggacga

SEQ ID NO: 2595 - DNA, 20 bp, Artificial Sequence
  Synthetic
ctgacatctttagtgggacg

SEQ ID NO: 2596 - DNA, 20 bp, Artificial Sequence
  Synthetic
tctgacatctttagtgggac

SEQ ID NO: 2597 - DNA, 20 bp, Artificial Sequence
  Synthetic
gtctgacatctttagtggga

SEQ ID NO: 2598 - DNA, 20 bp, Artificial Sequence
  Synthetic
ggtctgacatctttagtggg

SEQ ID NO: 2599 - DNA, 20 bp, Artificial Sequence
  Synthetic
gggtctgacatctttagtgg

SEQ ID NO: 2600 - DNA, 20 bp, Artificial Sequence
  Synthetic
tgggtctgacatctttagtg

SEQ ID NO: 2601 - DNA, 20 bp, Artificial Sequence
  Synthetic
atgggtctgacatctttagt

SEQ ID NO: 2602 - DNA, 20 bp, Artificial Sequence
  Synthetic
gatgggtctgacatctttag

SEQ ID NO: 2603 - DNA, 20 bp, Artificial Sequence
  Synthetic
tgatgggtctgacatcttta

SEQ ID NO: 2604 - DNA, 20 bp, Artificial Sequence
  Synthetic
ttgatgggtctgacatcttt

SEQ ID NO: 2605 - DNA, 20 bp, Artificial Sequence
  Synthetic
gttgatgggtctgacatctt

SEQ ID NO: 2606 - DNA, 20 bp, Artificial Sequence
  Synthetic
cgttgatgggtctgacatct

SEQ ID NO: 2607 - DNA, 20 bp, Artificial Sequence
  Synthetic
acgttgatgggtctgacatc

SEQ ID NO: 2608 - DNA, 20 bp, Artificial Sequence
  Synthetic
gacgttgatgggtctgacat

SEQ ID NO: 2609 - DNA, 20 bp, Artificial Sequence
  Synthetic
agacgttgatgggtctgaca

SEQ ID NO: 2610 - DNA, 20 bp, Artificial Sequence
  Synthetic
gagacgttgatgggtctgac

SEQ ID NO: 2611 - DNA, 20 bp, Artificial Sequence
  Synthetic
ggagacgttgatgggtctga

SEQ ID NO: 2612 - DNA, 20 bp, Artificial Sequence
  Synthetic
aggagacgttgatgggtctg

SEQ ID NO: 2613 - DNA, 20 bp, Artificial Sequence
  Synthetic
gaggagacgttgatgggtct

SEQ ID NO: 2614 - DNA, 20 bp, Artificial Sequence
  Synthetic
agaggagacgttgatgggtc

SEQ ID NO: 2615 - DNA, 20 bp, Artificial Sequence
  Synthetic
gagaggagacgttgatgggt

SEQ ID NO: 2616 - DNA, 20 bp, Artificial Sequence
  Synthetic
tgagaggagacgttgatggg

SEQ ID NO: 2617 - DNA, 20 bp, Artificial Sequence
  Synthetic
atgagaggagacgttgatgg

SEQ ID NO: 2618 - DNA, 20 bp, Artificial Sequence
  Synthetic
aatgagaggagacgttgatg

SEQ ID NO: 2619 - DNA, 20 bp, Artificial Sequence
  Synthetic
caatgagaggagacgttgat

SEQ ID NO: 2620 - DNA, 20 bp, Artificial Sequence
  Synthetic
acaatgagaggagacgttga

SEQ ID NO: 2621 - DNA, 20 bp, Artificial Sequence
  Synthetic
gacaatgagaggagacgttg

SEQ ID NO: 2622 - DNA, 20 bp, Artificial Sequence
  Synthetic
ggacaatgagaggagacgtt

SEQ ID NO: 2623 - DNA, 20 bp, Artificial Sequence
  Synthetic
gggacaatgagaggagacgt

SEQ ID NO: 2624 - DNA, 20 bp, Artificial Sequence
  Synthetic
ccagcagagggacaatgaga

SEQ ID NO: 2625 - DNA, 20 bp, Artificial Sequence
  Synthetic
cccagcagagggacaatgag

SEQ ID NO: 2626 - DNA, 20 bp, Artificial Sequence
  Synthetic
tcccagcagagggacaatga

SEQ ID NO: 2627 - DNA, 20 bp, Artificial Sequence
  Synthetic
gtcccagcagagggacaatg

SEQ ID NO: 2628 - DNA, 20 bp, Artificial Sequence
  Synthetic
tgtcccagcagagggacaat

SEQ ID NO: 2629 - DNA, 20 bp, Artificial Sequence
  Synthetic
ttgtcccagcagagggacaa

SEQ ID NO: 2630 - DNA, 20 bp, Artificial Sequence
  Synthetic
tttgtcccagcagagggaca

SEQ ID NO: 2631 - DNA, 20 bp, Artificial Sequence
  Synthetic
ctttgtcccagcagagggac

SEQ ID NO: 2632 - DNA, 20 bp, Artificial Sequence
  Synthetic
actttgtcccagcagaggga

SEQ ID NO: 2633 - DNA, 20 bp, Artificial Sequence
  Synthetic
cactttgtcccagcagaggg

SEQ ID NO: 2634 - DNA, 20 bp, Artificial Sequence
  Synthetic
gcactttgtcccagcagagg

SEQ ID NO: 2635 - DNA, 20 bp, Artificial Sequence
  Synthetic
acaccaagcactttgtccca

SEQ ID NO: 2636 - DNA, 20 bp, Artificial Sequence
  Synthetic
gacaccaagcactttgtccc

SEQ ID NO: 2637 - DNA, 20 bp, Artificial Sequence
  Synthetic
agacaccaagcactttgtcc

SEQ ID NO: 2638 - DNA, 20 bp, Artificial Sequence
  Synthetic
cagacaccaagcactttgtc

SEQ ID NO: 2639 - DNA, 20 bp, Artificial Sequence
  Synthetic
ccagacaccaagcactttgt

SEQ ID NO: 2640 - DNA, 20 bp, Artificial Sequence
  Synthetic
gccagacaccaagcactttg

SEQ ID NO: 2641 - DNA, 20 bp, Artificial Sequence
  Synthetic
agccagacaccaagcacttt

SEQ ID NO: 2642 - DNA, 20 bp, Artificial Sequence
  Synthetic
cagccagacaccaagcactt

SEQ ID NO: 2643 - DNA, 20 bp, Artificial Sequence
  Synthetic
ccagccagacaccaagcact

SEQ ID NO: 2644 - DNA, 20 bp, Artificial Sequence
  Synthetic
tcccccagccagacaccaag

SEQ ID NO: 2645 - DNA, 20 bp, Artificial Sequence
  Synthetic
gtcccccagccagacaccaa

SEQ ID NO: 2646 - DNA, 20 bp, Artificial Sequence
  Synthetic
tgtcccccagccagacacca

SEQ ID NO: 2647 - DNA, 20 bp, Artificial Sequence
  Synthetic
ttgtcccccagccagacacc

SEQ ID NO: 2648 - DNA, 20 bp, Artificial Sequence
  Synthetic
gttgtcccccagccagacac

SEQ ID NO: 2649 - DNA, 20 bp, Artificial Sequence
  Synthetic
ggttgtcccccagccagaca

SEQ ID NO: 2650 - DNA, 20 bp, Artificial Sequence
  Synthetic
tggttgtcccccagccagac

SEQ ID NO: 2651 - DNA, 20 bp, Artificial Sequence
  Synthetic
ttggttgtcccccagccaga

SEQ ID NO: 2652 - DNA, 20 bp, Artificial Sequence
  Synthetic
cttggttgtcccccagccag

SEQ ID NO: 2653 - DNA, 20 bp, Artificial Sequence
  Synthetic
tcttggttgtcccccagcca

SEQ ID NO: 2654 - DNA, 20 bp, Artificial Sequence
  Synthetic
ctcttggttgtcccccagcc

SEQ ID NO: 2655 - DNA, 20 bp, Artificial Sequence
  Synthetic
gctcttggttgtcccccagc

SEQ ID NO: 2656 - DNA, 20 bp, Artificial Sequence
  Synthetic
ggctcttggttgtcccccag

SEQ ID NO: 2657 - DNA, 20 bp, Artificial Sequence
  Synthetic
gggctcttggttgtccccca

SEQ ID NO: 2658 - DNA, 20 bp, Artificial Sequence
  Synthetic
gggggctcttggttgtcccc

SEQ ID NO: 2659 - DNA, 20 bp, Artificial Sequence
  Synthetic
tgggggctcttggttgtccc

SEQ ID NO: 2660 - DNA, 20 bp, Artificial Sequence
  Synthetic
ttgggggctcttggttgtcc

SEQ ID NO: 2661 - DNA, 20 bp, Artificial Sequence
  Synthetic
cttgggggctcttggttgtc

SEQ ID NO: 2662 - DNA, 20 bp, Artificial Sequence
  Synthetic
acttgggggctcttggttgt

SEQ ID NO: 2663 - DNA, 20 bp, Artificial Sequence
  Synthetic
cacttgggggctcttggttg

SEQ ID NO: 2664 - DNA, 20 bp, Artificial Sequence
  Synthetic
gcacttgggggctcttggtt

SEQ ID NO: 2665 - DNA, 20 bp, Artificial Sequence
  Synthetic
tgcacttgggggctcttggt

SEQ ID NO: 2666 - DNA, 20 bp, Artificial Sequence
  Synthetic
gtgcacttgggggctcttgg

SEQ ID NO: 2667 - DNA, 20 bp, Artificial Sequence
  Synthetic
agtgcacttgggggctcttg

SEQ ID NO: 2668 - DNA, 20 bp, Artificial Sequence
  Synthetic
aagtgcacttgggggctctt

SEQ ID NO: 2669 - DNA, 20 bp, Artificial Sequence
  Synthetic
gaagtgcacttgggggctct

SEQ ID NO: 2670 - DNA, 20 bp, Artificial Sequence
  Synthetic
ggaagtgcacttgggggctc

SEQ ID NO: 2671 - DNA, 20 bp, Artificial Sequence
  Synthetic
gggaagtgcacttgggggct

SEQ ID NO: 2672 - DNA, 20 bp, Artificial Sequence
  Synthetic
tagggaagtgcacttggggg

SEQ ID NO: 2673 - DNA, 20 bp, Artificial Sequence
  Synthetic
ttagggaagtgcacttgggg

SEQ ID NO: 2674 - DNA, 20 bp, Artificial Sequence
  Synthetic
cttagggaagtgcacttggg

SEQ ID NO: 2675 - DNA, 20 bp, Artificial Sequence
  Synthetic
ccttagggaagtgcacttgg

SEQ ID NO: 2676 - DNA, 20 bp, Artificial Sequence
  Synthetic
accttagggaagtgcacttg

SEQ ID NO: 2677 - DNA, 20 bp, Artificial Sequence
  Synthetic
gaccttagggaagtgcactt

SEQ ID NO: 2678 - DNA, 20 bp, Artificial Sequence
  Synthetic
ggaccttagggaagtgcact

SEQ ID NO: 2679 - DNA, 20 bp, Artificial Sequence
  Synthetic
aggaccttagggaagtgcac

SEQ ID NO: 2680 - DNA, 20 bp, Artificial Sequence
  Synthetic
gaggaccttagggaagtgca

SEQ ID NO: 2681 - DNA, 20 bp, Artificial Sequence
  Synthetic
ggaggaccttagggaagtgc

SEQ ID NO: 2682 - DNA, 20 bp, Artificial Sequence
  Synthetic
tggaggaccttagggaagtg

SEQ ID NO: 2683 - DNA, 20 bp, Artificial Sequence
  Synthetic
ctggaggaccttagggaagt

SEQ ID NO: 2684 - DNA, 20 bp, Artificial Sequence
  Synthetic
actggaggaccttagggaag

SEQ ID NO: 2685 - DNA, 20 bp, Artificial Sequence
  Synthetic
cactggaggaccttagggaa

SEQ ID NO: 2686 - DNA, 20 bp, Artificial Sequence
  Synthetic
gcactggaggaccttaggga

SEQ ID NO: 2687 - DNA, 20 bp, Artificial Sequence
  Synthetic
agcactggaggaccttaggg

SEQ ID NO: 2688 - DNA, 20 bp, Artificial Sequence
  Synthetic
aagcactggaggaccttagg

SEQ ID NO: 2689 - DNA, 20 bp, Artificial Sequence
  Synthetic
caagcactggaggaccttag

SEQ ID NO: 2690 - DNA, 20 bp, Artificial Sequence
  Synthetic
tcaagcactggaggacctta

SEQ ID NO: 2691 - DNA, 20 bp, Artificial Sequence
  Synthetic
ttcaagcactggaggacctt

SEQ ID NO: 2692 - DNA, 20 bp, Artificial Sequence
  Synthetic
attcaagcactggaggacct

SEQ ID NO: 2693 - DNA, 20 bp, Artificial Sequence
  Synthetic
tattcaagcactggaggacc

SEQ ID NO: 2694 - DNA, 20 bp, Artificial Sequence
  Synthetic
atattcaagcactggaggac

SEQ ID NO: 2695 - DNA, 20 bp, Artificial Sequence
  Synthetic
gatattcaagcactggagga

SEQ ID NO: 2696 - DNA, 20 bp, Artificial Sequence
  Synthetic
tgatattcaagcactggagg

SEQ ID NO: 2697 - DNA, 20 bp, Artificial Sequence
  Synthetic
ctgatattcaagcactggag

SEQ ID NO: 2698 - DNA, 20 bp, Artificial Sequence
  Synthetic
gctgatattcaagcactgga

SEQ ID NO: 2699 - DNA, 20 bp, Artificial Sequence
  Synthetic
cgctgatattcaagcactgg

SEQ ID NO: 2700 - DNA, 20 bp, Artificial Sequence
  Synthetic
acgctgatattcaagcactg

SEQ ID NO: 2701 - DNA, 20 bp, Artificial Sequence
  Synthetic
cacgctgatattcaagcact

SEQ ID NO: 2702 - DNA, 20 bp, Artificial Sequence
  Synthetic
tagcacgctgatattcaagc

SEQ ID NO: 2703 - DNA, 20 bp, Artificial Sequence
  Synthetic
ttagcacgctgatattcaag

SEQ ID NO: 2704 - DNA, 20 bp, Artificial Sequence
  Synthetic
cttagcacgctgatattcaa

SEQ ID NO: 2705 - DNA, 20 bp, Artificial Sequence
  Synthetic
acttagcacgctgatattca

SEQ ID NO: 2706 - DNA, 20 bp, Artificial Sequence
  Synthetic
gacttagcacgctgatattc

SEQ ID NO: 2707 - DNA, 20 bp, Artificial Sequence
  Synthetic
tgacttagcacgctgatatt

SEQ ID NO: 2708 - DNA, 20 bp, Artificial Sequence
  Synthetic
ctgacttagcacgctgatat

SEQ ID NO: 2709 - DNA, 20 bp, Artificial Sequence
  Synthetic
tctgacttagcacgctgata

SEQ ID NO: 2710 - DNA, 20 bp, Artificial Sequence
  Synthetic
ttctgacttagcacgctgat

SEQ ID NO: 2711 - DNA, 20 bp, Artificial Sequence
  Synthetic
tttctgacttagcacgctga

SEQ ID NO: 2712 - DNA, 20 bp, Artificial Sequence
  Synthetic
ttttctgacttagcacgctg

SEQ ID NO: 2713 - DNA, 20 bp, Artificial Sequence
  Synthetic
cttttctgacttagcacgct

SEQ ID NO: 2714 - DNA, 20 bp, Artificial Sequence
  Synthetic
ccttttctgacttagcacgc

SEQ ID NO: 2715 - DNA, 20 bp, Artificial Sequence
  Synthetic
accttttctgacttagcacg

SEQ ID NO: 2716 - DNA, 20 bp, Artificial Sequence
  Synthetic
caccttttctgacttagcac

SEQ ID NO: 2717 - DNA, 20 bp, Artificial Sequence
  Synthetic
gcaccttttctgacttagca

SEQ ID NO: 2718 - DNA, 20 bp, Artificial Sequence
  Synthetic
cgcaccttttctgacttagc

SEQ ID NO: 2719 - DNA, 20 bp, Artificial Sequence
  Synthetic
tcgcaccttttctgacttag

SEQ ID NO: 2720 - DNA, 20 bp, Artificial Sequence
  Synthetic
ctcgcaccttttctgactta

SEQ ID NO: 2721 - DNA, 20 bp, Artificial Sequence
  Synthetic
cctcgcaccttttctgactt

SEQ ID NO: 2722 - DNA, 20 bp, Artificial Sequence
  Synthetic
tcctcgcaccttttctgact

SEQ ID NO: 2723 - DNA, 20 bp, Artificial Sequence
  Synthetic
atcctcgcaccttttctgac

SEQ ID NO: 2724 - DNA, 20 bp, Artificial Sequence
  Synthetic
catcctcgcaccttttctga

SEQ ID NO: 2725 - DNA, 20 bp, Artificial Sequence
  Synthetic
gcatcctcgcaccttttctg

SEQ ID NO: 2726 - DNA, 20 bp, Artificial Sequence
  Synthetic
agcatcctcgcaccttttct

SEQ ID NO: 2727 - DNA, 20 bp, Artificial Sequence
  Synthetic
aagcatcctcgcaccttttc

SEQ ID NO: 2728 - DNA, 20 bp, Artificial Sequence
  Synthetic
taagcatcctcgcacctttt

SEQ ID NO: 2729 - DNA, 20 bp, Artificial Sequence
  Synthetic
gtaagcatcctcgcaccttt

SEQ ID NO: 2730 - DNA, 20 bp, Artificial Sequence
  Synthetic
ggtaagcatcctcgcacctt

SEQ ID NO: 2731 - DNA, 20 bp, Artificial Sequence
  Synthetic
gggtaagcatcctcgcacct

SEQ ID NO: 2732 - DNA, 20 bp, Artificial Sequence
  Synthetic
cgggtaagcatcctcgcacc

SEQ ID NO: 2733 - DNA, 20 bp, Artificial Sequence
  Synthetic
tcgggtaagcatcctcgcac

SEQ ID NO: 2734 - DNA, 20 bp, Artificial Sequence
  Synthetic
ctcgggtaagcatcctcgca

SEQ ID NO: 2735 - DNA, 20 bp, Artificial Sequence
  Synthetic
tctcgggtaagcatcctcgc

SEQ ID NO: 2736 - DNA, 20 bp, Artificial Sequence
  Synthetic
gtctcgggtaagcatcctcg

SEQ ID NO: 2737 - DNA, 20 bp, Artificial Sequence
  Synthetic
tgtctcgggtaagcatcctc

SEQ ID NO: 2738 - DNA, 20 bp, Artificial Sequence
  Synthetic
ctgtctcgggtaagcatcct

SEQ ID NO: 2739 - DNA, 20 bp, Artificial Sequence
  Synthetic
tctgtctcgggtaagcatcc

SEQ ID NO: 2740 - DNA, 20 bp, Artificial Sequence
  Synthetic
atctgtctcgggtaagcatc

SEQ ID NO: 2741 - DNA, 20 bp, Artificial Sequence
  Synthetic
tatctgtctcgggtaagcat

SEQ ID NO: 2742 - DNA, 20 bp, Artificial Sequence
  Synthetic
ctatctgtctcgggtaagca

SEQ ID NO: 2743 - DNA, 20 bp, Artificial Sequence
  Synthetic
tctatctgtctcgggtaagc

SEQ ID NO: 2744 - DNA, 20 bp, Artificial Sequence
  Synthetic
atctatctgtctcgggtaag

SEQ ID NO: 2745 - DNA, 20 bp, Artificial Sequence
  Synthetic
catctatctgtctcgggtaa

SEQ ID NO: 2746 - DNA, 20 bp, Artificial Sequence
  Synthetic
tcatctatctgtctcgggta

SEQ ID NO: 2747 - DNA, 20 bp, Artificial Sequence
  Synthetic
gtcatctatctgtctcgggt

SEQ ID NO: 2748 - DNA, 20 bp, Artificial Sequence
  Synthetic
tgtcatctatctgtctcggg

SEQ ID NO: 2749 - DNA, 20 bp, Artificial Sequence
  Synthetic
gtgtcatctatctgtctcgg

SEQ ID NO: 2750 - DNA, 20 bp, Artificial Sequence
  Synthetic
ggtgtcatctatctgtctcg

SEQ ID NO: 2751 - DNA, 20 bp, Artificial Sequence
  Synthetic
tggtgtcatctatctgtctc

SEQ ID NO: 2752 - DNA, 20 bp, Artificial Sequence
  Synthetic
atggtgtcatctatctgtct

SEQ ID NO: 2753 - DNA, 20 bp, Artificial Sequence
  Synthetic
catggtgtcatctatctgtc

SEQ ID NO: 2754 - DNA, 20 bp, Artificial Sequence
  Synthetic
acatggtgtcatctatctgt

SEQ ID NO: 2755 - DNA, 20 bp, Artificial Sequence
  Synthetic
aacatggtgtcatctatctg

SEQ ID NO: 2756 - DNA, 20 bp, Artificial Sequence
  Synthetic
gaacatggtgtcatctatct

SEQ ID NO: 2757 - DNA, 20 bp, Artificial Sequence
  Synthetic
agaacatggtgtcatctatc

SEQ ID NO: 2758 - DNA, 20 bp, Artificial Sequence
  Synthetic
cagaacatggtgtcatctat

SEQ ID NO: 2759 - DNA, 20 bp, Artificial Sequence
  Synthetic
gcagaacatggtgtcatcta

SEQ ID NO: 2760 - DNA, 20 bp, Artificial Sequence
  Synthetic
cgcagaacatggtgtcatct

SEQ ID NO: 2761 - DNA, 20 bp, Artificial Sequence
  Synthetic
gcgcagaacatggtgtcatc

SEQ ID NO: 2762 - DNA, 20 bp, Artificial Sequence
  Synthetic
ggcgcagaacatggtgtcat

SEQ ID NO: 2763 - DNA, 20 bp, Artificial Sequence
  Synthetic
cggcgcagaacatggtgtca

SEQ ID NO: 2764 - DNA, 20 bp, Artificial Sequence
  Synthetic
ccggcgcagaacatggtgtc

SEQ ID NO: 2765 - DNA, 20 bp, Artificial Sequence
  Synthetic
accggcgcagaacatggtgt

SEQ ID NO: 2766 - DNA, 20 bp, Artificial Sequence
  Synthetic
caccggcgcagaacatggtg

SEQ ID NO: 2767 - DNA, 20 bp, Artificial Sequence
  Synthetic
tcaccggcgcagaacatggt

SEQ ID NO: 2768 - DNA, 20 bp, Artificial Sequence
  Synthetic
gtcaccggcgcagaacatgg

SEQ ID NO: 2769 - DNA, 20 bp, Artificial Sequence
  Synthetic
tgtcaccggcgcagaacatg

SEQ ID NO: 2770 - DNA, 20 bp, Artificial Sequence
  Synthetic
ttgtcaccggcgcagaacat

SEQ ID NO: 2771 - DNA, 20 bp, Artificial Sequence
  Synthetic
tttgtcaccggcgcagaaca

SEQ ID NO: 2772 - DNA, 20 bp, Artificial Sequence
  Synthetic
ctttgtcaccggcgcagaac

SEQ ID NO: 2773 - DNA, 20 bp, Artificial Sequence
  Synthetic
gctttgtcaccggcgcagaa

SEQ ID NO: 2774 - DNA, 20 bp, Artificial Sequence
  Synthetic
tgctttgtcaccggcgcaga

SEQ ID NO: 2775 - DNA, 20 bp, Artificial Sequence
  Synthetic
ctgctttgtcaccggcgcag

SEQ ID NO: 2776 - DNA, 20 bp, Artificial Sequence
  Synthetic
cctgctttgtcaccggcgca

SEQ ID NO: 2777 - DNA, 20 bp, Artificial Sequence
  Synthetic
acctgctttgtcaccggcgc

SEQ ID NO: 2778 - DNA, 20 bp, Artificial Sequence
  Synthetic
tacctgctttgtcaccggcg

SEQ ID NO: 2779 - DNA, 20 bp, Artificial Sequence
  Synthetic
ctacctgctttgtcaccggc

SEQ ID NO: 2780 - DNA, 20 bp, Artificial Sequence
  Synthetic
tctacctgctttgtcaccgg

SEQ ID NO: 2781 - DNA, 20 bp, Artificial Sequence
  Synthetic
ctctacctgctttgtcaccg

SEQ ID NO: 2782 - DNA, 20 bp, Artificial Sequence
  Synthetic
tctctacctgctttgtcacc

SEQ ID NO: 2783 - DNA, 20 bp, Artificial Sequence
  Synthetic
gtctctacctgctttgtcac

SEQ ID NO: 2784 - DNA, 20 bp, Artificial Sequence
  Synthetic
agtctctacctgctttgtca

SEQ ID NO: 2785 - DNA, 20 bp, Artificial Sequence
  Synthetic
gagtctctacctgctttgtc

SEQ ID NO: 2786 - DNA, 20 bp, Artificial Sequence
  Synthetic
ggagtctctacctgctttgt

SEQ ID NO: 2787 - DNA, 20 bp, Artificial Sequence
  Synthetic
aggagtctctacctgctttg

SEQ ID NO: 2788 - DNA, 20 bp, Artificial Sequence
  Synthetic
caggagtctctacctgcttt

SEQ ID NO: 2789 - DNA, 20 bp, Artificial Sequence
  Synthetic
gcaggagtctctacctgctt

SEQ ID NO: 2790 - DNA, 20 bp, Artificial Sequence
  Synthetic
ggcaggagtctctacctgct

SEQ ID NO: 2791 - DNA, 20 bp, Artificial Sequence
  Synthetic
tggcaggagtctctacctgc

SEQ ID NO: 2792 - DNA, 20 bp, Artificial Sequence
  Synthetic
ctggcaggagtctctacctg

SEQ ID NO: 2793 - DNA, 20 bp, Artificial Sequence
  Synthetic
cctggcaggagtctctacct

SEQ ID NO: 2794 - DNA, 20 bp, Artificial Sequence
  Synthetic
ccctggcaggagtctctacc

SEQ ID NO: 2795 - DNA, 20 bp, Artificial Sequence
  Synthetic
accctggcaggagtctctac

SEQ ID NO: 2796 - DNA, 20 bp, Artificial Sequence
  Synthetic
caccctggcaggagtctcta

SEQ ID NO: 2797 - DNA, 20 bp, Artificial Sequence
  Synthetic
tcaccctggcaggagtctct

SEQ ID NO: 2798 - DNA, 20 bp, Artificial Sequence
  Synthetic
atcaccctggcaggagtctc

SEQ ID NO: 2799 - DNA, 20 bp, Artificial Sequence
  Synthetic
aatcaccctggcaggagtct

SEQ ID NO: 2800 - DNA, 20 bp, Artificial Sequence
  Synthetic
gaatcaccctggcaggagtc

SEQ ID NO: 2801 - DNA, 20 bp, Artificial Sequence
  Synthetic
agaatcaccctggcaggagt

SEQ ID NO: 2802 - DNA, 20 bp, Artificial Sequence
  Synthetic
cccccagaatcaccctggca

SEQ ID NO: 2803 - DNA, 20 bp, Artificial Sequence
  Synthetic
ccccccagaatcaccctggc

SEQ ID NO: 2804 - DNA, 20 bp, Artificial Sequence
  Synthetic
gccccccagaatcaccctgg

SEQ ID NO: 2805 - DNA, 20 bp, Artificial Sequence
  Synthetic
ggccccccagaatcaccctg

SEQ ID NO: 2806 - DNA, 20 bp, Artificial Sequence
  Synthetic
aggccccccagaatcaccct

SEQ ID NO: 2807 - DNA, 20 bp, Artificial Sequence
  Synthetic
acaggccccccagaatcacc

SEQ ID NO: 2808 - DNA, 20 bp, Artificial Sequence
  Synthetic
cacaggccccccagaatcac

SEQ ID NO: 2809 - DNA, 20 bp, Artificial Sequence
  Synthetic
ccacaggccccccagaatca

SEQ ID NO: 2810 - DNA, 20 bp, Artificial Sequence
  Synthetic
accacaggccccccagaatc

SEQ ID NO: 2811 - DNA, 20 bp, Artificial Sequence
  Synthetic
gaccacaggccccccagaat

SEQ ID NO: 2812 - DNA, 20 bp, Artificial Sequence
  Synthetic
tgcagaccacaggcccccca

SEQ ID NO: 2813 - DNA, 20 bp, Artificial Sequence
  Synthetic
ttgcagaccacaggcccccc

SEQ ID NO: 2814 - DNA, 20 bp, Artificial Sequence
  Synthetic
attgcagaccacaggccccc

SEQ ID NO: 2815 - DNA, 20 bp, Artificial Sequence
  Synthetic
cattgcagaccacaggcccc

SEQ ID NO: 2816 - DNA, 20 bp, Artificial Sequence
  Synthetic
ccattgcagaccacaggccc

SEQ ID NO: 2817 - DNA, 20 bp, Artificial Sequence
  Synthetic
gccattgcagaccacaggcc

SEQ ID NO: 2818 - DNA, 20 bp, Artificial Sequence
  Synthetic
tgcagggagccattgcagac

SEQ ID NO: 2819 - DNA, 20 bp, Artificial Sequence
  Synthetic
ctgcagggagccattgcaga

SEQ ID NO: 2820 - DNA, 20 bp, Artificial Sequence
  Synthetic
cctgcagggagccattgcag

SEQ ID NO: 2821 - DNA, 20 bp, Artificial Sequence
  Synthetic
ccctgcagggagccattgca

SEQ ID NO: 2822 - DNA, 20 bp, Artificial Sequence
  Synthetic
tccctgcagggagccattgc

SEQ ID NO: 2823 - DNA, 20 bp, Artificial Sequence
  Synthetic
gtccctgcagggagccattg

SEQ ID NO: 2824 - DNA, 20 bp, Artificial Sequence
  Synthetic
agtccctgcagggagccatt

SEQ ID NO: 2825 - DNA, 20 bp, Artificial Sequence
  Synthetic
gagtccctgcagggagccat

SEQ ID NO: 2826 - DNA, 20 bp, Artificial Sequence
  Synthetic
cgagtccctgcagggagcca

SEQ ID NO: 2827 - DNA, 20 bp, Artificial Sequence
  Synthetic
caggacacgagtccctgcag

SEQ ID NO: 2828 - DNA, 20 bp, Artificial Sequence
  Synthetic
ccaggacacgagtccctgca

SEQ ID NO: 2829 - DNA, 20 bp, Artificial Sequence
  Synthetic
cccaggacacgagtccctgc

SEQ ID NO: 2830 - DNA, 20 bp, Artificial Sequence
  Synthetic
ccccaggacacgagtccctg

SEQ ID NO: 2831 - DNA, 20 bp, Artificial Sequence
  Synthetic
tccccaggacacgagtccct

SEQ ID NO: 2832 - DNA, 20 bp, Artificial Sequence
  Synthetic
ctccccaggacacgagtccc

SEQ ID NO: 2833 - DNA, 20 bp, Artificial Sequence
  Synthetic
tctccccaggacacgagtcc

SEQ ID NO: 2834 - DNA, 20 bp, Artificial Sequence
  Synthetic
atctccccaggacacgagtc

SEQ ID NO: 2835 - DNA, 20 bp, Artificial Sequence
  Synthetic
aatctccccaggacacgagt

SEQ ID NO: 2836 - DNA, 20 bp, Artificial Sequence
  Synthetic
taatctccccaggacacgag

SEQ ID NO: 2837 - DNA, 20 bp, Artificial Sequence
  Synthetic
gtaatctccccaggacacga

SEQ ID NO: 2838 - DNA, 20 bp, Artificial Sequence
  Synthetic
ggtaatctccccaggacacg

SEQ ID NO: 2839 - DNA, 20 bp, Artificial Sequence
  Synthetic
gggtaatctccccaggacac

SEQ ID NO: 2840 - DNA, 20 bp, Artificial Sequence
  Synthetic
agggtaatctccccaggaca

SEQ ID NO: 2841 - DNA, 20 bp, Artificial Sequence
  Synthetic
ggcacaagggtaatctcccc

SEQ ID NO: 2842 - DNA, 20 bp, Artificial Sequence
  Synthetic
gggcacaagggtaatctccc

SEQ ID NO: 2843 - DNA, 20 bp, Artificial Sequence
  Synthetic
cgggcacaagggtaatctcc

SEQ ID NO: 2844 - DNA, 20 bp, Artificial Sequence
  Synthetic
ccgggcacaagggtaatctc

SEQ ID NO: 2845 - DNA, 20 bp, Artificial Sequence
  Synthetic
gccgggcacaagggtaatct

SEQ ID NO: 2846 - DNA, 20 bp, Artificial Sequence
  Synthetic
ggccgggcacaagggtaatc

SEQ ID NO: 2847 - DNA, 20 bp, Artificial Sequence
  Synthetic
gggccgggcacaagggtaat

SEQ ID NO: 2848 - DNA, 20 bp, Artificial Sequence
  Synthetic
tgggccgggcacaagggtaa

SEQ ID NO: 2849 - DNA, 20 bp, Artificial Sequence
  Synthetic
ttgggccgggcacaagggta

SEQ ID NO: 2850 - DNA, 20 bp, Artificial Sequence
  Synthetic
gttgggccgggcacaagggt

SEQ ID NO: 2851 - DNA, 20 bp, Artificial Sequence
  Synthetic
tgttgggccgggcacaaggg

SEQ ID NO: 2852 - DNA, 20 bp, Artificial Sequence
  Synthetic
ctgttgggccgggcacaagg

SEQ ID NO: 2853 - DNA, 20 bp, Artificial Sequence
  Synthetic
tctgttgggccgggcacaag

SEQ ID NO: 2854 - DNA, 20 bp, Artificial Sequence
  Synthetic
gtctgttgggccgggcacaa

SEQ ID NO: 2855 - DNA, 20 bp, Artificial Sequence
  Synthetic
ggtctgttgggccgggcaca

SEQ ID NO: 2856 - DNA, 20 bp, Artificial Sequence
  Synthetic
cggtctgttgggccgggcac

SEQ ID NO: 2857 - DNA, 20 bp, Artificial Sequence
  Synthetic
ccggtctgttgggccgggca

SEQ ID NO: 2858 - DNA, 20 bp, Artificial Sequence
  Synthetic
agacacccggtctgttgggc

SEQ ID NO: 2859 - DNA, 20 bp, Artificial Sequence
  Synthetic
tagacacccggtctgttggg

SEQ ID NO: 2860 - DNA, 20 bp, Artificial Sequence
  Synthetic
gtagacacccggtctgttgg

SEQ ID NO: 2861 - DNA, 20 bp, Artificial Sequence
  Synthetic
tgtagacacccggtctgttg

SEQ ID NO: 2862 - DNA, 20 bp, Artificial Sequence
  Synthetic
gtgtagacacccggtctgtt

SEQ ID NO: 2863 - DNA, 20 bp, Artificial Sequence
  Synthetic
cgtgtagacacccggtctgt

SEQ ID NO: 2864 - DNA, 20 bp, Artificial Sequence
  Synthetic
tcgtgtagacacccggtctg

SEQ ID NO: 2865 - DNA, 20 bp, Artificial Sequence
  Synthetic
ttcgtgtagacacccggtct

SEQ ID NO: 2866 - DNA, 20 bp, Artificial Sequence
  Synthetic
gttcgtgtagacacccggtc

SEQ ID NO: 2867 - DNA, 20 bp, Artificial Sequence
  Synthetic
ggttcgtgtagacacccggt

SEQ ID NO: 2868 - DNA, 20 bp, Artificial Sequence
  Synthetic
aggttcgtgtagacacccgg

SEQ ID NO: 2869 - DNA, 20 bp, Artificial Sequence
  Synthetic
gaggttcgtgtagacacccg

SEQ ID NO: 2870 - DNA, 20 bp, Artificial Sequence
  Synthetic
tgcagaggttcgtgtagaca

SEQ ID NO: 2871 - DNA, 20 bp, Artificial Sequence
  Synthetic
ttgcagaggttcgtgtagac

SEQ ID NO: 2872 - DNA, 20 bp, Artificial Sequence
  Synthetic
cttgcagaggttcgtgtaga

SEQ ID NO: 2873 - DNA, 20 bp, Artificial Sequence
  Synthetic
acttgcagaggttcgtgtag

SEQ ID NO: 2874 - DNA, 20 bp, Artificial Sequence
  Synthetic
aacttgcagaggttcgtgta

SEQ ID NO: 2875 - DNA, 20 bp, Artificial Sequence
  Synthetic
gaacttgcagaggttcgtgt

SEQ ID NO: 2876 - DNA, 20 bp, Artificial Sequence
  Synthetic
tgaacttgcagaggttcgtg

SEQ ID NO: 2877 - DNA, 20 bp, Artificial Sequence
  Synthetic
gtgaacttgcagaggttcgt

SEQ ID NO: 2878 - DNA, 20 bp, Artificial Sequence
  Synthetic
ggtgaacttgcagaggttcg

SEQ ID NO: 2879 - DNA, 20 bp, Artificial Sequence
  Synthetic
tggtgaacttgcagaggttc

SEQ ID NO: 2880 - DNA, 20 bp, Artificial Sequence
  Synthetic
ttggtgaacttgcagaggtt

SEQ ID NO: 2881 - DNA, 20 bp, Artificial Sequence
  Synthetic
cttggtgaacttgcagaggt

SEQ ID NO: 2882 - DNA, 20 bp, Artificial Sequence
  Synthetic
acttggtgaacttgcagagg

SEQ ID NO: 2883 - DNA, 20 bp, Artificial Sequence
  Synthetic
cacttggtgaacttgcagag

SEQ ID NO: 2884 - DNA, 20 bp, Artificial Sequence
  Synthetic
ccacttggtgaacttgcaga

SEQ ID NO: 2885 - DNA, 20 bp, Artificial Sequence
  Synthetic
tccacttggtgaacttgcag

SEQ ID NO: 2886 - DNA, 20 bp, Artificial Sequence
  Synthetic
atccacttggtgaacttgca

SEQ ID NO: 2887 - DNA, 20 bp, Artificial Sequence
  Synthetic
gatccacttggtgaacttgc

SEQ ID NO: 2888 - DNA, 20 bp, Artificial Sequence
  Synthetic
ggatccacttggtgaacttg

SEQ ID NO: 2889 - DNA, 20 bp, Artificial Sequence
  Synthetic
tggatccacttggtgaactt

SEQ ID NO: 2890 - DNA, 20 bp, Artificial Sequence
  Synthetic
ctggatccacttggtgaact

SEQ ID NO: 2891 - DNA, 20 bp, Artificial Sequence
  Synthetic
cctggatccacttggtgaac

SEQ ID NO: 2892 - DNA, 20 bp, Artificial Sequence
  Synthetic
tcctggatccacttggtgaa

SEQ ID NO: 2893 - DNA, 20 bp, Artificial Sequence
  Synthetic
ttcctggatccacttggtga

SEQ ID NO: 2894 - DNA, 20 bp, Artificial Sequence
  Synthetic
tttcctggatccacttggtg

SEQ ID NO: 2895 - DNA, 20 bp, Artificial Sequence
  Synthetic
gtttcctggatccacttggt

SEQ ID NO: 2896 - DNA, 20 bp, Artificial Sequence
  Synthetic
ggtttcctggatccacttgg

SEQ ID NO: 2897 - DNA, 20 bp, Artificial Sequence
  Synthetic
tggtttcctggatccacttg

SEQ ID NO: 2898 - DNA, 20 bp, Artificial Sequence
  Synthetic
atggtttcctggatccactt

SEQ ID NO: 2899 - DNA, 20 bp, Artificial Sequence
  Synthetic
gatggtttcctggatccact

SEQ ID NO: 2900 - DNA, 20 bp, Artificial Sequence
  Synthetic
ggatggtttcctggatccac

SEQ ID NO: 2901 - DNA, 20 bp, Artificial Sequence
  Synthetic
tggatggtttcctggatcca

SEQ ID NO: 2902 - DNA, 20 bp, Artificial Sequence
  Synthetic
ctggatggtttcctggatcc

SEQ ID NO: 2903 - DNA, 20 bp, Artificial Sequence
  Synthetic
cctggatggtttcctggatc

SEQ ID NO: 2904 - DNA, 20 bp, Artificial Sequence
  Synthetic
gcctggatggtttcctggat

SEQ ID NO: 2905 - DNA, 20 bp, Artificial Sequence
  Synthetic
ggcctggatggtttcctgga

SEQ ID NO: 2906 - DNA, 20 bp, Artificial Sequence
  Synthetic
tggcctggatggtttcctgg

SEQ ID NO: 2907 - DNA, 20 bp, Artificial Sequence
  Synthetic
ttggcctggatggtttcctg

SEQ ID NO: 2908 - DNA, 20 bp, Artificial Sequence
  Synthetic
gttggcctggatggtttcct

SEQ ID NO: 2909 - DNA, 20 bp, Artificial Sequence
  Synthetic
agttggcctggatggtttcc

SEQ ID NO: 2910 - DNA, 20 bp, Artificial Sequence
  Synthetic
gagttggcctggatggtttc

SEQ ID NO: 2911 - DNA, 20 bp, Artificial Sequence
  Synthetic
ggagttggcctggatggttt

SEQ ID NO: 2912 - DNA, 20 bp, Artificial Sequence
  Synthetic
aggagttggcctggatggtt

SEQ ID NO: 2913 - DNA, 20 bp, Artificial Sequence
  Synthetic
caggagttggcctggatggt

SEQ ID NO: 2914 - DNA, 20 bp, Artificial Sequence
  Synthetic
tcaggagttggcctggatgg

SEQ ID NO: 2915 - DNA, 20 bp, Artificial Sequence
  Synthetic
ctcaggagttggcctggatg

SEQ ID NO: 2916 - DNA, 20 bp, Artificial Sequence
  Synthetic
actcaggagttggcctggat

SEQ ID NO: 2917 - DNA, 20 bp, Artificial Sequence
  Synthetic
gactcaggagttggcctgga

SEQ ID NO: 2918 - DNA, 20 bp, Artificial Sequence
  Synthetic
tgactcaggagttggcctgg

SEQ ID NO: 2919 - DNA, 20 bp, Artificial Sequence
  Synthetic
atgactcaggagttggcctg

SEQ ID NO: 2920 - DNA, 20 bp, Artificial Sequence
  Synthetic
gatgactcaggagttggcct

SEQ ID NO: 2921 - DNA, 20 bp, Artificial Sequence
  Synthetic
ggatgactcaggagttggcc

SEQ ID NO: 2922 - DNA, 20 bp, Artificial Sequence
  Synthetic
gggatgactcaggagttggc

SEQ ID NO: 2923 - DNA, 20 bp, Artificial Sequence
  Synthetic
tgggatgactcaggagttgg

SEQ ID NO: 2924 - DNA, 20 bp, Artificial Sequence
  Synthetic
ctgggatgactcaggagttg

SEQ ID NO: 2925 - DNA, 20 bp, Artificial Sequence
  Synthetic
cctgggatgactcaggagtt

SEQ ID NO: 2926 - DNA, 20 bp, Artificial Sequence
  Synthetic
tcctgggatgactcaggagt

SEQ ID NO: 2927 - DNA, 20 bp, Artificial Sequence
  Synthetic
gtcctgggatgactcaggag

SEQ ID NO: 2928 - DNA, 20 bp, Artificial Sequence
  Synthetic
agtcctgggatgactcagga

SEQ ID NO: 2929 - DNA, 20 bp, Artificial Sequence
  Synthetic
gagtcctgggatgactcagg

SEQ ID NO: 2930 - DNA, 20 bp, Artificial Sequence
  Synthetic
tgagtcctgggatgactcag

SEQ ID NO: 2931 - DNA, 20 bp, Artificial Sequence
  Synthetic
ctgagtcctgggatgactca

SEQ ID NO: 2932 - DNA, 20 bp, Artificial Sequence
  Synthetic
gctgagtcctgggatgactc

SEQ ID NO: 2933 - DNA, 20 bp, Artificial Sequence
  Synthetic
tgctgagtcctgggatgact

SEQ ID NO: 2934 - DNA, 20 bp, Artificial Sequence
  Synthetic
gtgctgagtcctgggatgac

SEQ ID NO: 2935 - DNA, 20 bp, Artificial Sequence
  Synthetic
tgtgctgagtcctgggatga

SEQ ID NO: 2936 - DNA, 20 bp, Artificial Sequence
  Synthetic
gtgtgctgagtcctgggatg

SEQ ID NO: 2937 - DNA, 20 bp, Artificial Sequence
  Synthetic
ggtgtgctgagtcctgggat

SEQ ID NO: 2938 - DNA, 20 bp, Artificial Sequence
  Synthetic
cggtgtgctgagtcctggga

SEQ ID NO: 2939 - DNA, 20 bp, Artificial Sequence
  Synthetic
ccggtgtgctgagtcctggg

SEQ ID NO: 2940 - DNA, 20 bp, Artificial Sequence
  Synthetic
gccggtgtgctgagtcctgg

SEQ ID NO: 2941 - DNA, 20 bp, Artificial Sequence
  Synthetic
tgccggtgtgctgagtcctg

SEQ ID NO: 2942 - DNA, 20 bp, Artificial Sequence
  Synthetic
atgccggtgtgctgagtcct

SEQ ID NO: 2943 - DNA, 20 bp, Artificial Sequence
  Synthetic
gatgccggtgtgctgagtcc

SEQ ID NO: 2944 - DNA, 20 bp, Artificial Sequence
  Synthetic
ggatgccggtgtgctgagtc

SEQ ID NO: 2945 - DNA, 20 bp, Artificial Sequence
  Synthetic
gggatgccggtgtgctgagt

SEQ ID NO: 2946 - DNA, 20 bp, Artificial Sequence
  Synthetic
ggggatgccggtgtgctgag

SEQ ID NO: 2947 - DNA, 20 bp, Artificial Sequence
  Synthetic
tggggatgccggtgtgctga

SEQ ID NO: 2948 - DNA, 20 bp, Artificial Sequence
  Synthetic
gtggggatgccggtgtgctg

SEQ ID NO: 2949 - DNA, 20 bp, Artificial Sequence
  Synthetic
ggtggggatgccggtgtgct

SEQ ID NO: 2950 - DNA, 20 bp, Artificial Sequence
  Synthetic
aggtggggatgccggtgtgc

SEQ ID NO: 2951 - DNA, 20 bp, Artificial Sequence
  Synthetic
caggtggggatgccggtgtg

SEQ ID NO: 2952 - DNA, 20 bp, Artificial Sequence
  Synthetic
gcaggtggggatgccggtgt

SEQ ID NO: 2953 - DNA, 20 bp, Artificial Sequence
  Synthetic
agcaggtggggatgccggtg

SEQ ID NO: 2954 - DNA, 20 bp, Artificial Sequence
  Synthetic
cagcaggtggggatgccggt

SEQ ID NO: 2955 - DNA, 20 bp, Artificial Sequence
  Synthetic
tgcagcaggtggggatgccg

SEQ ID NO: 2956 - DNA, 20 bp, Artificial Sequence
  Synthetic
ctgcagcaggtggggatgcc

SEQ ID NO: 2957 - DNA, 20 bp, Artificial Sequence
  Synthetic
cctgcagcaggtggggatgc

SEQ ID NO: 2958 - DNA, 20 bp, Artificial Sequence
  Synthetic
ccctgcagcaggtggggatg

SEQ ID NO: 2959 - DNA, 20 bp, Artificial Sequence
  Synthetic
tccctgcagcaggtggggat

SEQ ID NO: 2960 - DNA, 20 bp, Artificial Sequence
  Synthetic
gtccctgcagcaggtgggga

SEQ ID NO: 2961 - DNA, 20 bp, Artificial Sequence
  Synthetic
tgtccctgcagcaggtgggg

SEQ ID NO: 2962 - DNA, 20 bp, Artificial Sequence
  Synthetic
ctgtccctgcagcaggtggg

SEQ ID NO: 2963 - DNA, 20 bp, Artificial Sequence
  Synthetic
gctgtccctgcagcaggtgg

SEQ ID NO: 2964 - DNA, 20 bp, Artificial Sequence
  Synthetic
ggctgtccctgcagcaggtg

SEQ ID NO: 2965 - DNA, 20 bp, Artificial Sequence
  Synthetic
gggctgtccctgcagcaggt

SEQ ID NO: 2966 - DNA, 20 bp, Artificial Sequence
  Synthetic
tcagggctgtccctgcagca

SEQ ID NO: 2967 - DNA, 20 bp, Artificial Sequence
  Synthetic
gtcagggctgtccctgcagc

SEQ ID NO: 2968 - DNA, 20 bp, Artificial Sequence
  Synthetic
tgtcagggctgtccctgcag

SEQ ID NO: 2969 - DNA, 20 bp, Artificial Sequence
  Synthetic
gtgtcagggctgtccctgca

SEQ ID NO: 2970 - DNA, 20 bp, Artificial Sequence
  Synthetic
agtgtcagggctgtccctgc

SEQ ID NO: 2971 - DNA, 20 bp, Artificial Sequence
  Synthetic
gagtgtcagggctgtccctg

SEQ ID NO: 2972 - DNA, 20 bp, Artificial Sequence
  Synthetic
ggagtgtcagggctgtccct

SEQ ID NO: 2973 - DNA, 20 bp, Artificial Sequence
  Synthetic
aggagtgtcagggctgtccc

SEQ ID NO: 2974 - DNA, 20 bp, Artificial Sequence
  Synthetic
aaggagtgtcagggctgtcc

SEQ ID NO: 2975 - DNA, 20 bp, Artificial Sequence
  Synthetic
aaaggagtgtcagggctgtc

SEQ ID NO: 2976 - DNA, 20 bp, Artificial Sequence
  Synthetic
gaaaggagtgtcagggctgt

SEQ ID NO: 2977 - DNA, 20 bp, Artificial Sequence
  Synthetic
tgaaaggagtgtcagggctg

SEQ ID NO: 2978 - DNA, 20 bp, Artificial Sequence
  Synthetic
ctgaaaggagtgtcagggct

SEQ ID NO: 2979 - DNA, 20 bp, Artificial Sequence
  Synthetic
tctgaaaggagtgtcagggc

SEQ ID NO: 2980 - DNA, 20 bp, Artificial Sequence
  Synthetic
gtctgaaaggagtgtcaggg

SEQ ID NO: 2981 - DNA, 20 bp, Artificial Sequence
  Synthetic
ggtctgaaaggagtgtcagg

SEQ ID NO: 2982 - DNA, 20 bp, Artificial Sequence
  Synthetic
gggtctgaaaggagtgtcag

SEQ ID NO: 2983 - DNA, 20 bp, Artificial Sequence
  Synthetic
agggtctgaaaggagtgtca

SEQ ID NO: 2984 - DNA, 20 bp, Artificial Sequence
  Synthetic
gagggtctgaaaggagtgtc

SEQ ID NO: 2985 - DNA, 20 bp, Artificial Sequence
  Synthetic
tgagggtctgaaaggagtgt

SEQ ID NO: 2986 - DNA, 20 bp, Artificial Sequence
  Synthetic
atgagggtctgaaaggagtg

SEQ ID NO: 2987 - DNA, 20 bp, Artificial Sequence
  Synthetic
aatgagggtctgaaaggagt

SEQ ID NO: 2988 - DNA, 20 bp, Artificial Sequence
  Synthetic
gaatgagggtctgaaaggag

SEQ ID NO: 2989 - DNA, 20 bp, Artificial Sequence
  Synthetic
ggaatgagggtctgaaagga

SEQ ID NO: 2990 - DNA, 20 bp, Artificial Sequence
  Synthetic
gaaggaatgagggtctgaaa

SEQ ID NO: 2991 - DNA, 20 bp, Artificial Sequence
  Synthetic
ggaaggaatgagggtctgaa

SEQ ID NO: 2992 - DNA, 20 bp, Artificial Sequence
  Synthetic
gggaaggaatgagggtctga

SEQ ID NO: 2993 - DNA, 20 bp, Artificial Sequence
  Synthetic
tgggaaggaatgagggtctg

SEQ ID NO: 2994 - DNA, 20 bp, Artificial Sequence
  Synthetic
ctgggaaggaatgagggtct

SEQ ID NO: 2995 - DNA, 20 bp, Artificial Sequence
  Synthetic
tctgggaaggaatgagggtc

SEQ ID NO: 2996 - DNA, 20 bp, Artificial Sequence
  Synthetic
ctctgggaaggaatgagggt

SEQ ID NO: 2997 - DNA, 20 bp, Artificial Sequence
  Synthetic
tctctgggaaggaatgaggg

SEQ ID NO: 2998 - DNA, 20 bp, Artificial Sequence
  Synthetic
atctctgggaaggaatgagg

SEQ ID NO: 2999 - DNA, 20 bp, Artificial Sequence
  Synthetic
catctctgggaaggaatgag

SEQ ID NO: 3000 - DNA, 20 bp, Artificial Sequence
  Synthetic
acatctctgggaaggaatga

SEQ ID NO: 3001 - DNA, 20 bp, Artificial Sequence
  Synthetic
aacatctctgggaaggaatg

SEQ ID NO: 3002 - DNA, 20 bp, Artificial Sequence
  Synthetic
caacatctctgggaaggaat

SEQ ID NO: 3003 - DNA, 20 bp, Artificial Sequence
  Synthetic
tcaacatctctgggaaggaa

SEQ ID NO: 3004 - DNA, 20 bp, Artificial Sequence
  Synthetic
ctcaacatctctgggaagga

SEQ ID NO: 3005 - DNA, 20 bp, Artificial Sequence
  Synthetic
tctcaacatctctgggaagg

SEQ ID NO: 3006 - DNA, 20 bp, Artificial Sequence
  Synthetic
ttctcaacatctctgggaag

SEQ ID NO: 3007 - DNA, 20 bp, Artificial Sequence
  Synthetic
attctcaacatctctgggaa

SEQ ID NO: 3008 - DNA, 20 bp, Artificial Sequence
  Synthetic
cattctcaacatctctggga

SEQ ID NO: 3009 - DNA, 20 bp, Artificial Sequence
  Synthetic
acattctcaacatctctggg

SEQ ID NO: 3010 - DNA, 20 bp, Artificial Sequence
  Synthetic
aacattctcaacatctctgg

SEQ ID NO: 3011 - DNA, 20 bp, Artificial Sequence
  Synthetic
gaacattctcaacatctctg

SEQ ID NO: 3012 - DNA, 20 bp, Artificial Sequence
  Synthetic
tgaacattctcaacatctct

SEQ ID NO: 3013 - DNA, 20 bp, Artificial Sequence
  Synthetic
atgaacattctcaacatctc

SEQ ID NO: 3014 - DNA, 20 bp, Artificial Sequence
  Synthetic
gatgaacattctcaacatct

SEQ ID NO: 3015 - DNA, 20 bp, Artificial Sequence
  Synthetic
agatgaacattctcaacatc

SEQ ID NO: 3016 - DNA, 20 bp, Artificial Sequence
  Synthetic
gagatgaacattctcaacat

SEQ ID NO: 3017 - DNA, 20 bp, Artificial Sequence
  Synthetic
gagagatgaacattctcaac

SEQ ID NO: 3018 - DNA, 20 bp, Artificial Sequence
  Synthetic
ggagagatgaacattctcaa

SEQ ID NO: 3019 - DNA, 20 bp, Artificial Sequence
  Synthetic
tggagagatgaacattctca

SEQ ID NO: 3020 - DNA, 20 bp, Artificial Sequence
  Synthetic
ctggagagatgaacattctc

SEQ ID NO: 3021 - DNA, 20 bp, Artificial Sequence
  Synthetic
gctggagagatgaacattct

SEQ ID NO: 3022 - DNA, 20 bp, Artificial Sequence
  Synthetic
ggctggagagatgaacattc

SEQ ID NO: 3023 - DNA, 20 bp, Artificial Sequence
  Synthetic
gggctggagagatgaacatt

SEQ ID NO: 3024 - DNA, 20 bp, Artificial Sequence
  Synthetic
ggggctggagagatgaacat

SEQ ID NO: 3025 - DNA, 20 bp, Artificial Sequence
  Synthetic
caggggctggagagatgaac

SEQ ID NO: 3026 - DNA, 20 bp, Artificial Sequence
  Synthetic
tcaggggctggagagatgaa

SEQ ID NO: 3027 - DNA, 20 bp, Artificial Sequence
  Synthetic
gtcaggggctggagagatga

SEQ ID NO: 3028 - DNA, 20 bp, Artificial Sequence
  Synthetic
ggtcaggggctggagagatg

SEQ ID NO: 3029 - DNA, 20 bp, Artificial Sequence
  Synthetic
gggtcaggggctggagagat

SEQ ID NO: 3030 - DNA, 20 bp, Artificial Sequence
  Synthetic
ggggtcaggggctggagaga

SEQ ID NO: 3031 - DNA, 20 bp, Artificial Sequence
  Synthetic
tggggtcaggggctggagag

SEQ ID NO: 3032 - DNA, 20 bp, Artificial Sequence
  Synthetic
atggggtcaggggctggaga

SEQ ID NO: 3033 - DNA, 20 bp, Artificial Sequence
  Synthetic
catggggtcaggggctggag

SEQ ID NO: 3034 - DNA, 20 bp, Artificial Sequence
  Synthetic
acatggggtcaggggctgga

SEQ ID NO: 3035 - DNA, 20 bp, Artificial Sequence
  Synthetic
gacatggggtcaggggctgg

SEQ ID NO: 3036 - DNA, 20 bp, Artificial Sequence
  Synthetic
agacatggggtcaggggctg

SEQ ID NO: 3037 - DNA, 20 bp, Artificial Sequence
  Synthetic
gagacatggggtcaggggct

SEQ ID NO: 3038 - DNA, 20 bp, Artificial Sequence
  Synthetic
ccaggagacatggggtcagg

SEQ ID NO: 3039 - DNA, 20 bp, Artificial Sequence
  Synthetic
tccaggagacatggggtcag

SEQ ID NO: 3040 - DNA, 20 bp, Artificial Sequence
  Synthetic
gtccaggagacatggggtca

SEQ ID NO: 3041 - DNA, 20 bp, Artificial Sequence
  Synthetic
agtccaggagacatggggtc

SEQ ID NO: 3042 - DNA, 20 bp, Artificial Sequence
  Synthetic
gagtccaggagacatggggt

SEQ ID NO: 3043 - DNA, 20 bp, Artificial Sequence
  Synthetic
tgagtccaggagacatgggg

SEQ ID NO: 3044 - DNA, 20 bp, Artificial Sequence
  Synthetic
ctgagtccaggagacatggg

SEQ ID NO: 3045 - DNA, 20 bp, Artificial Sequence
  Synthetic
cctgagtccaggagacatgg

SEQ ID NO: 3046 - DNA, 20 bp, Artificial Sequence
  Synthetic
ccctgagtccaggagacatg

SEQ ID NO: 3047 - DNA, 20 bp, Artificial Sequence
  Synthetic
accctgagtccaggagacat

SEQ ID NO: 3048 - DNA, 20 bp, Artificial Sequence
  Synthetic
gaagcagaccctgagtccag

SEQ ID NO: 3049 - DNA, 20 bp, Artificial Sequence
  Synthetic
ggaagcagaccctgagtcca

SEQ ID NO: 3050 - DNA, 20 bp, Artificial Sequence
  Synthetic
gggaagcagaccctgagtcc

SEQ ID NO: 3051 - DNA, 20 bp, Artificial Sequence
  Synthetic
ggggaagcagaccctgagtc

SEQ ID NO: 3052 - DNA, 20 bp, Artificial Sequence
  Synthetic
gggggaagcagaccctgagt

SEQ ID NO: 3053 - DNA, 20 bp, Artificial Sequence
  Synthetic
tgggggaagcagaccctgag

SEQ ID NO: 3054 - DNA, 20 bp, Artificial Sequence
  Synthetic
gtgggggaagcagaccctga

SEQ ID NO: 3055 - DNA, 20 bp, Artificial Sequence
  Synthetic
tgtgggggaagcagaccctg

SEQ ID NO: 3056 - DNA, 20 bp, Artificial Sequence
  Synthetic
atgtgggggaagcagaccct

SEQ ID NO: 3057 - DNA, 20 bp, Artificial Sequence
  Synthetic
aatgtgggggaagcagaccc

SEQ ID NO: 3058 - DNA, 20 bp, Artificial Sequence
  Synthetic
caatgtgggggaagcagacc

SEQ ID NO: 3059 - DNA, 20 bp, Artificial Sequence
  Synthetic
ccaatgtgggggaagcagac

SEQ ID NO: 3060 - DNA, 20 bp, Artificial Sequence
  Synthetic
tcagcccaatgtgggggaag

SEQ ID NO: 3061 - DNA, 20 bp, Artificial Sequence
  Synthetic
gtcagcccaatgtgggggaa

SEQ ID NO: 3062 - DNA, 20 bp, Artificial Sequence
  Synthetic
ggtcagcccaatgtggggga

SEQ ID NO: 3063 - DNA, 20 bp, Artificial Sequence
  Synthetic
cggtcagcccaatgtggggg

SEQ ID NO: 3064 - DNA, 20 bp, Artificial Sequence
  Synthetic
acggtcagcccaatgtgggg

SEQ ID NO: 3065 - DNA, 20 bp, Artificial Sequence
  Synthetic
cacggtcagcccaatgtggg

SEQ ID NO: 3066 - DNA, 20 bp, Artificial Sequence
  Synthetic
acacggtcagcccaatgtgg

SEQ ID NO: 3067 - DNA, 20 bp, Artificial Sequence
  Synthetic
gacacggtcagcccaatgtg

SEQ ID NO: 3068 - DNA, 20 bp, Artificial Sequence
  Synthetic
agacacggtcagcccaatgt

SEQ ID NO: 3069 - DNA, 20 bp, Artificial Sequence
  Synthetic
gagacacggtcagcccaatg

SEQ ID NO: 3070 - DNA, 20 bp, Artificial Sequence
  Synthetic
agagacacggtcagcccaat

SEQ ID NO: 3071 - DNA, 20 bp, Artificial Sequence
  Synthetic
tagagagacacggtcagccc

SEQ ID NO: 3072 - DNA, 20 bp, Artificial Sequence
  Synthetic
ctagagagacacggtcagcc

SEQ ID NO: 3073 - DNA, 20 bp, Artificial Sequence
  Synthetic
actagagagacacggtcagc

SEQ ID NO: 3074 - DNA, 20 bp, Artificial Sequence
  Synthetic
aactagagagacacggtcag

SEQ ID NO: 3075 - DNA, 20 bp, Artificial Sequence
  Synthetic
caactagagagacacggtca

SEQ ID NO: 3076 - DNA, 20 bp, Artificial Sequence
  Synthetic
tcaactagagagacacggtc

SEQ ID NO: 3077 - DNA, 20 bp, Artificial Sequence
  Synthetic
ttcaactagagagacacggt

SEQ ID NO: 3078 - DNA, 20 bp, Artificial Sequence
  Synthetic
gttcaactagagagacacgg

SEQ ID NO: 3079 - DNA, 20 bp, Artificial Sequence
  Synthetic
ggttcaactagagagacacg

SEQ ID NO: 3080 - DNA, 20 bp, Artificial Sequence
  Synthetic
gggttcaactagagagacac

SEQ ID NO: 3081 - DNA, 20 bp, Artificial Sequence
  Synthetic
agggttcaactagagagaca

SEQ ID NO: 3082 - DNA, 20 bp, Artificial Sequence
  Synthetic
tcccagggttcaactagaga

SEQ ID NO: 3083 - DNA, 20 bp, Artificial Sequence
  Synthetic
ttcccagggttcaactagag

SEQ ID NO: 3084 - DNA, 20 bp, Artificial Sequence
  Synthetic
gttcccagggttcaactaga

SEQ ID NO: 3085 - DNA, 20 bp, Artificial Sequence
  Synthetic
tgttcccagggttcaactag

SEQ ID NO: 3086 - DNA, 20 bp, Artificial Sequence
  Synthetic
ttgttcccagggttcaacta

SEQ ID NO: 3087 - DNA, 20 bp, Artificial Sequence
  Synthetic
attgttcccagggttcaact

SEQ ID NO: 3088 - DNA, 20 bp, Artificial Sequence
  Synthetic
aattgttcccagggttcaac

SEQ ID NO: 3089 - DNA, 20 bp, Artificial Sequence
  Synthetic
aaattgttcccagggttcaa

SEQ ID NO: 3090 - DNA, 20 bp, Artificial Sequence
  Synthetic
gaaattgttcccagggttca

SEQ ID NO: 3091 - DNA, 20 bp, Artificial Sequence
  Synthetic
ggaaattgttcccagggttc

SEQ ID NO: 3092 - DNA, 20 bp, Artificial Sequence
  Synthetic
tggaaattgttcccagggtt

SEQ ID NO: 3093 - DNA, 20 bp, Artificial Sequence
  Synthetic
ttggaaattgttcccagggt

SEQ ID NO: 3094 - DNA, 20 bp, Artificial Sequence
  Synthetic
tttggaaattgttcccaggg

SEQ ID NO: 3095 - DNA, 20 bp, Artificial Sequence
  Synthetic
ttttggaaattgttcccagg

SEQ ID NO: 3096 - DNA, 20 bp, Artificial Sequence
  Synthetic
gttttggaaattgttcccag

SEQ ID NO: 3097 - DNA, 20 bp, Artificial Sequence
  Synthetic
agttttggaaattgttccca

SEQ ID NO: 3098 - DNA, 20 bp, Artificial Sequence
  Synthetic
cagttttggaaattgttccc

SEQ ID NO: 3099 - DNA, 20 bp, Artificial Sequence
  Synthetic
acagttttggaaattgttcc

SEQ ID NO: 3100 - DNA, 20 bp, Artificial Sequence
  Synthetic
gacagttttggaaattgttc

SEQ ID NO: 3101 - DNA, 20 bp, Artificial Sequence
  Synthetic
ggacagttttggaaattgtt

SEQ ID NO: 3102 - DNA, 20 bp, Artificial Sequence
  Synthetic
tggacagttttggaaattgt

SEQ ID NO: 3103 - DNA, 20 bp, Artificial Sequence
  Synthetic
ctggacagttttggaaattg

SEQ ID NO: 3104 - DNA, 20 bp, Artificial Sequence
  Synthetic
cctggacagttttggaaatt

SEQ ID NO: 3105 - DNA, 20 bp, Artificial Sequence
  Synthetic
ccctggacagttttggaaat

SEQ ID NO: 3106 - DNA, 20 bp, Artificial Sequence
  Synthetic
gccctggacagttttggaaa

SEQ ID NO: 3107 - DNA, 20 bp, Artificial Sequence
  Synthetic
cgccctggacagttttggaa

SEQ ID NO: 3108 - DNA, 20 bp, Artificial Sequence
  Synthetic
ccgccctggacagttttgga

SEQ ID NO: 3109 - DNA, 20 bp, Artificial Sequence
  Synthetic
cccgccctggacagttttgg

SEQ ID NO: 3110 - DNA, 20 bp, Artificial Sequence
  Synthetic
ccccgccctggacagttttg

SEQ ID NO: 3111 - DNA, 20 bp, Artificial Sequence
  Synthetic
cccccgccctggacagtttt

SEQ ID NO: 3112 - DNA, 20 bp, Artificial Sequence
  Synthetic
acccccgccctggacagttt

SEQ ID NO: 3113 - DNA, 20 bp, Artificial Sequence
  Synthetic
aacccccgccctggacagtt

SEQ ID NO: 3114 - DNA, 20 bp, Artificial Sequence
  Synthetic
caacccccgccctggacagt

SEQ ID NO: 3115 - DNA, 20 bp, Artificial Sequence
  Synthetic
acgcaacccccgccctggac

SEQ ID NO: 3116 - DNA, 20 bp, Artificial Sequence
  Synthetic
gacgcaacccccgccctgga

SEQ ID NO: 3117 - DNA, 20 bp, Artificial Sequence
  Synthetic
agacgcaacccccgccctgg

SEQ ID NO: 3118 - DNA, 20 bp, Artificial Sequence
  Synthetic
gagacgcaacccccgccctg

SEQ ID NO: 3119 - DNA, 20 bp, Artificial Sequence
  Synthetic
tgagacgcaacccccgccct

SEQ ID NO: 3120 - DNA, 20 bp, Artificial Sequence
  Synthetic
ttgagacgcaacccccgccc

SEQ ID NO: 3121 - DNA, 20 bp, Artificial Sequence
  Synthetic
attgagacgcaacccccgcc

SEQ ID NO: 3122 - DNA, 20 bp, Artificial Sequence
  Synthetic
gattgagacgcaacccccgc

SEQ ID NO: 3123 - DNA, 20 bp, Artificial Sequence
  Synthetic
agattgagacgcaacccccg

SEQ ID NO: 3124 - DNA, 20 bp, Artificial Sequence
  Synthetic
gagattgagacgcaaccccc

SEQ ID NO: 3125 - DNA, 20 bp, Artificial Sequence
  Synthetic
tgccccagggagattgagac

SEQ ID NO: 3126 - DNA, 20 bp, Artificial Sequence
  Synthetic
gtgccccagggagattgaga

SEQ ID NO: 3127 - DNA, 20 bp, Artificial Sequence
  Synthetic
agtgccccagggagattgag

SEQ ID NO: 3128 - DNA, 20 bp, Artificial Sequence
  Synthetic
aagtgccccagggagattga

SEQ ID NO: 3129 - DNA, 20 bp, Artificial Sequence
  Synthetic
aaagtgccccagggagattg

SEQ ID NO: 3130 - DNA, 20 bp, Artificial Sequence
  Synthetic
gaaagtgccccagggagatt

SEQ ID NO: 3131 - DNA, 20 bp, Artificial Sequence
  Synthetic
tgaaagtgccccagggagat

SEQ ID NO: 3132 - DNA, 20 bp, Artificial Sequence
  Synthetic
atgaaagtgccccagggaga

SEQ ID NO: 3133 - DNA, 20 bp, Artificial Sequence
  Synthetic
gatgaaagtgccccagggag

SEQ ID NO: 3134 - DNA, 20 bp, Artificial Sequence
  Synthetic
ggatgaaagtgccccaggga

SEQ ID NO: 3135 - DNA, 20 bp, Artificial Sequence
  Synthetic
aggatgaaagtgccccaggg

SEQ ID NO: 3136 - DNA, 20 bp, Artificial Sequence
  Synthetic
tgaggatgaaagtgccccag

SEQ ID NO: 3137 - DNA, 20 bp, Artificial Sequence
  Synthetic
ttgaggatgaaagtgcccca

SEQ ID NO: 3138 - DNA, 20 bp, Artificial Sequence
  Synthetic
cttgaggatgaaagtgcccc

SEQ ID NO: 3139 - DNA, 20 bp, Artificial Sequence
  Synthetic
gcttgaggatgaaagtgccc

SEQ ID NO: 3140 - DNA, 20 bp, Artificial Sequence
  Synthetic
agcttgaggatgaaagtgcc

SEQ ID NO: 3141 - DNA, 20 bp, Artificial Sequence
  Synthetic
gagcttgaggatgaaagtgc

SEQ ID NO: 3142 - DNA, 20 bp, Artificial Sequence
  Synthetic
tgagcttgaggatgaaagtg

SEQ ID NO: 3143 - DNA, 20 bp, Artificial Sequence
  Synthetic
ctgagcttgaggatgaaagt

SEQ ID NO: 3144 - DNA, 20 bp, Artificial Sequence
  Synthetic
cctgagcttgaggatgaaag

SEQ ID NO: 3145 - DNA, 20 bp, Artificial Sequence
  Synthetic
ccctgagcttgaggatgaaa

SEQ ID NO: 3146 - DNA, 20 bp, Artificial Sequence
  Synthetic
gccctgagcttgaggatgaa

SEQ ID NO: 3147 - DNA, 20 bp, Artificial Sequence
  Synthetic
ggccctgagcttgaggatga

SEQ ID NO: 3148 - DNA, 20 bp, Artificial Sequence
  Synthetic
gggccctgagcttgaggatg

SEQ ID NO: 3149 - DNA, 20 bp, Artificial Sequence
  Synthetic
tgggccctgagcttgaggat

SEQ ID NO: 3150 - DNA, 20 bp, Artificial Sequence
  Synthetic
atgggccctgagcttgagga

SEQ ID NO: 3151 - DNA, 20 bp, Artificial Sequence
  Synthetic
gatgggccctgagcttgagg

SEQ ID NO: 3152 - DNA, 20 bp, Artificial Sequence
  Synthetic
ggatgggccctgagcttgag

SEQ ID NO: 3153 - DNA, 20 bp, Artificial Sequence
  Synthetic
gggatgggccctgagcttga

SEQ ID NO: 3154 - DNA, 20 bp, Artificial Sequence
  Synthetic
agggatgggccctgagcttg

SEQ ID NO: 3155 - DNA, 20 bp, Artificial Sequence
  Synthetic
aagggatgggccctgagctt

SEQ ID NO: 3156 - DNA, 20 bp, Artificial Sequence
  Synthetic
gaagggatgggccctgagct

SEQ ID NO: 3157 - DNA, 20 bp, Artificial Sequence
  Synthetic
agaagggatgggccctgagc

SEQ ID NO: 3158 - DNA, 20 bp, Artificial Sequence
  Synthetic
gagaagggatgggccctgag

SEQ ID NO: 3159 - DNA, 20 bp, Artificial Sequence
  Synthetic
agagaagggatgggccctga

SEQ ID NO: 3160 - DNA, 20 bp, Artificial Sequence
  Synthetic
cagagaagggatgggccctg

SEQ ID NO: 3161 - DNA, 20 bp, Artificial Sequence
  Synthetic
gcagagaagggatgggccct

SEQ ID NO: 3162 - DNA, 20 bp, Artificial Sequence
  Synthetic
tgcagagaagggatgggccc

SEQ ID NO: 3163 - DNA, 20 bp, Artificial Sequence
  Synthetic
ctgcagagaagggatgggcc

SEQ ID NO: 3164 - DNA, 20 bp, Artificial Sequence
  Synthetic
gctgcagagaagggatgggc

SEQ ID NO: 3165 - DNA, 20 bp, Artificial Sequence
  Synthetic
agctgcagagaagggatggg

SEQ ID NO: 3166 - DNA, 20 bp, Artificial Sequence
  Synthetic
gagctgcagagaagggatgg

SEQ ID NO: 3167 - DNA, 20 bp, Artificial Sequence
  Synthetic
agagctgcagagaagggatg

SEQ ID NO: 3168 - DNA, 20 bp, Artificial Sequence
  Synthetic
cagagctgcagagaagggat

SEQ ID NO: 3169 - DNA, 20 bp, Artificial Sequence
  Synthetic
tcagagctgcagagaaggga

SEQ ID NO: 3170 - DNA, 20 bp, Artificial Sequence
  Synthetic
gtcagagctgcagagaaggg

SEQ ID NO: 3171 - DNA, 20 bp, Artificial Sequence
  Synthetic
ggtcagagctgcagagaagg

SEQ ID NO: 3172 - DNA, 20 bp, Artificial Sequence
  Synthetic
gggtcagagctgcagagaag

SEQ ID NO: 3173 - DNA, 20 bp, Artificial Sequence
  Synthetic
tgggtcagagctgcagagaa

SEQ ID NO: 3174 - DNA, 20 bp, Artificial Sequence
  Synthetic
ttgggtcagagctgcagaga

SEQ ID NO: 3175 - DNA, 20 bp, Artificial Sequence
  Synthetic
tttgggtcagagctgcagag

SEQ ID NO: 3176 - DNA, 20 bp, Artificial Sequence
  Synthetic
atttgggtcagagctgcaga

SEQ ID NO: 3177 - DNA, 20 bp, Artificial Sequence
  Synthetic
aatttgggtcagagctgcag

SEQ ID NO: 3178 - DNA, 20 bp, Artificial Sequence
  Synthetic
aaatttgggtcagagctgca

SEQ ID NO: 3179 - DNA, 20 bp, Artificial Sequence
  Synthetic
taaatttgggtcagagctgc

SEQ ID NO: 3180 - DNA, 20 bp, Artificial Sequence
  Synthetic
ctaaatttgggtcagagctg

SEQ ID NO: 3181 - DNA, 20 bp, Artificial Sequence
  Synthetic
actaaatttgggtcagagct

SEQ ID NO: 3182 - DNA, 20 bp, Artificial Sequence
  Synthetic
gactaaatttgggtcagagc

SEQ ID NO: 3183 - DNA, 20 bp, Artificial Sequence
  Synthetic
ggactaaatttgggtcagag

SEQ ID NO: 3184 - DNA, 20 bp, Artificial Sequence
  Synthetic
gggactaaatttgggtcaga

SEQ ID NO: 3185 - DNA, 20 bp, Artificial Sequence
  Synthetic
tgggactaaatttgggtcag

SEQ ID NO: 3186 - DNA, 20 bp, Artificial Sequence
  Synthetic
ctgggactaaatttgggtca

SEQ ID NO: 3187 - DNA, 20 bp, Artificial Sequence
  Synthetic
tctgggactaaatttgggtc

SEQ ID NO: 3188 - DNA, 20 bp, Artificial Sequence
  Synthetic
ttctgggactaaatttgggt

SEQ ID NO: 3189 - DNA, 20 bp, Artificial Sequence
  Synthetic
tttctgggactaaatttggg

SEQ ID NO: 3190 - DNA, 20 bp, Artificial Sequence
  Synthetic
atttctgggactaaatttgg

SEQ ID NO: 3191 - DNA, 20 bp, Artificial Sequence
  Synthetic
tatttctgggactaaatttg

SEQ ID NO: 3192 - DNA, 20 bp, Artificial Sequence
  Synthetic
ttatttctgggactaaattt

SEQ ID NO: 3193 - DNA, 20 bp, Artificial Sequence
  Synthetic
tttatttctgggactaaatt

SEQ ID NO: 3194 - DNA, 20 bp, Artificial Sequence
  Synthetic
gtttatttctgggactaaat

SEQ ID NO: 3195 - DNA, 20 bp, Artificial Sequence
  Synthetic
agtttatttctgggactaaa

SEQ ID NO: 3196 - DNA, 20 bp, Artificial Sequence
  Synthetic
cagtttatttctgggactaa

SEQ ID NO: 3197 - DNA, 20 bp, Artificial Sequence
  Synthetic
tcagtttatttctgggacta

SEQ ID NO: 3198 - DNA, 20 bp, Artificial Sequence
  Synthetic
ctcagtttatttctgggact

SEQ ID NO: 3199 - DNA, 20 bp, Artificial Sequence
  Synthetic
tctcagtttatttctgggac

SEQ ID NO: 3200 - DNA, 20 bp, Artificial Sequence
  Synthetic
ttctcagtttatttctggga

SEQ ID NO: 3201 - DNA, 20 bp, Artificial Sequence
  Synthetic
cttctcagtttatttctggg

SEQ ID NO: 3202 - DNA, 20 bp, Artificial Sequence
  Synthetic
acttctcagtttatttctgg

SEQ ID NO: 3203 - DNA, 20 bp, Artificial Sequence
  Synthetic
cacttctcagtttatttctg

SEQ ID NO: 3204 - DNA, 20 bp, Artificial Sequence
  Synthetic
ccacttctcagtttatttct

SEQ ID NO: 3205 - DNA, 20 bp, Artificial Sequence
  Synthetic
tccacttctcagtttatttc

SEQ ID NO: 3206 - DNA, 20 bp, Artificial Sequence
  Synthetic
ttccacttctcagtttattt

SEQ ID NO: 3207 - DNA, 20 bp, Artificial Sequence
  Synthetic
cagctagagggtgggtgtct

SEQ ID NO: 3208 - DNA, 20 bp, Artificial Sequence
  Synthetic
ccagctagagggtgggtgtc

SEQ ID NO: 3209 - DNA, 20 bp, Artificial Sequence
  Synthetic
accagctagagggtgggtgt

SEQ ID NO: 3210 - DNA, 20 bp, Artificial Sequence
  Synthetic
gaccagctagagggtgggtg

SEQ ID NO: 3211 - DNA, 20 bp, Artificial Sequence
  Synthetic
agaccagctagagggtgggt

SEQ ID NO: 3212 - DNA, 20 bp, Artificial Sequence
  Synthetic
ccagaccagctagagggtgg

SEQ ID NO: 3213 - DNA, 20 bp, Artificial Sequence
  Synthetic
gccagaccagctagagggtg

SEQ ID NO: 3214 - DNA, 20 bp, Artificial Sequence
  Synthetic
ggccagaccagctagagggt

SEQ ID NO: 3215 - DNA, 20 bp, Artificial Sequence
  Synthetic
aggccagaccagctagaggg

SEQ ID NO: 3216 - DNA, 20 bp, Artificial Sequence
  Synthetic
gaggccagaccagctagagg

SEQ ID NO: 3217 - DNA, 20 bp, Artificial Sequence
  Synthetic
agaggccagaccagctagag

SEQ ID NO: 3218 - DNA, 20 bp, Artificial Sequence
  Synthetic
aagaggccagaccagctaga

SEQ ID NO: 3219 - DNA, 20 bp, Artificial Sequence
  Synthetic
caagaggccagaccagctag

SEQ ID NO: 3220 - DNA, 20 bp, Artificial Sequence
  Synthetic
tcaagaggccagaccagcta

SEQ ID NO: 3221 - DNA, 20 bp, Artificial Sequence
  Synthetic
ctcaagaggccagaccagct

SEQ ID NO: 3222 - DNA, 20 bp, Artificial Sequence
  Synthetic
actcaagaggccagaccagc

SEQ ID NO: 3223 - DNA, 20 bp, Artificial Sequence
  Synthetic
gactcaagaggccagaccag

SEQ ID NO: 3224 - DNA, 20 bp, Artificial Sequence
  Synthetic
agactcaagaggccagacca

SEQ ID NO: 3225 - DNA, 20 bp, Artificial Sequence
  Synthetic
cagactcaagaggccagacc

SEQ ID NO: 3226 - DNA, 20 bp, Artificial Sequence
  Synthetic
tcagactcaagaggccagac

SEQ ID NO: 3227 - DNA, 20 bp, Artificial Sequence
  Synthetic
ttcagactcaagaggccaga

SEQ ID NO: 3228 - DNA, 20 bp, Artificial Sequence
  Synthetic
tttcagactcaagaggccag

SEQ ID NO: 3229 - DNA, 20 bp, Artificial Sequence
  Synthetic
gtttcagactcaagaggcca

SEQ ID NO: 3230 - DNA, 20 bp, Artificial Sequence
  Synthetic
ggtttcagactcaagaggcc

SEQ ID NO: 3231 - DNA, 20 bp, Artificial Sequence
  Synthetic
gggtttcagactcaagaggc

SEQ ID NO: 3232 - DNA, 20 bp, Artificial Sequence
  Synthetic
tgggtttcagactcaagagg

SEQ ID NO: 3233 - DNA, 20 bp, Artificial Sequence
  Synthetic
gtgggtttcagactcaagag

SEQ ID NO: 3234 - DNA, 20 bp, Artificial Sequence
  Synthetic
ggtgggtttcagactcaaga

SEQ ID NO: 3235 - DNA, 20 bp, Artificial Sequence
  Synthetic
gggtgggtttcagactcaag

SEQ ID NO: 3236 - DNA, 20 bp, Artificial Sequence
  Synthetic
ggggtgggtttcagactcaa

SEQ ID NO: 3237 - DNA, 20 bp, Artificial Sequence
  Synthetic
gggggtgggtttcagactca

SEQ ID NO: 3238 - DNA, 20 bp, Artificial Sequence
  Synthetic
tgggggtgggtttcagactc

SEQ ID NO: 3239 - DNA, 20 bp, Artificial Sequence
  Synthetic
ctgggggtgggtttcagact

SEQ ID NO: 3240 - DNA, 20 bp, Artificial Sequence
  Synthetic
gctgggggtgggtttcagac

SEQ ID NO: 3241 - DNA, 20 bp, Artificial Sequence
  Synthetic
ggctgggggtgggtttcaga

SEQ ID NO: 3242 - DNA, 20 bp, Artificial Sequence
  Synthetic
gggctgggggtgggtttcag

SEQ ID NO: 3243 - DNA, 20 bp, Artificial Sequence
  Synthetic
tgggctgggggtgggtttca

SEQ ID NO: 3244 - DNA, 20 bp, Artificial Sequence
  Synthetic
ttgggctgggggtgggtttc

SEQ ID NO: 3245 - DNA, 20 bp, Artificial Sequence
  Synthetic
cttgggctgggggtgggttt

SEQ ID NO: 3246 - DNA, 20 bp, Artificial Sequence
  Synthetic
gcttgggctgggggtgggtt

SEQ ID NO: 3247 - DNA, 20 bp, Artificial Sequence
  Synthetic
ggcttgggctgggggtgggt

SEQ ID NO: 3248 - DNA, 20 bp, Artificial Sequence
  Synthetic
gggcttgggctgggggtggg

SEQ ID NO: 3249 - DNA, 20 bp, Artificial Sequence
  Synthetic
ggggcttgggctgggggtgg

SEQ ID NO: 3250 - DNA, 20 bp, Artificial Sequence
  Synthetic
cggggcttgggctgggggtg

SEQ ID NO: 3251 - DNA, 20 bp, Artificial Sequence
  Synthetic
gcggggcttgggctgggggt

SEQ ID NO: 3252 - DNA, 20 bp, Artificial Sequence
  Synthetic
ggcggggcttgggctggggg

SEQ ID NO: 3253 - DNA, 20 bp, Artificial Sequence
  Synthetic
aggcggggcttgggctgggg

SEQ ID NO: 3254 - DNA, 20 bp, Artificial Sequence
  Synthetic
gaggcggggcttgggctggg

SEQ ID NO: 3255 - DNA, 20 bp, Artificial Sequence
  Synthetic
agaggcggggcttgggctgg

SEQ ID NO: 3256 - DNA, 20 bp, Artificial Sequence
  Synthetic
cagaggcggggcttgggctg

SEQ ID NO: 3257 - DNA, 20 bp, Artificial Sequence
  Synthetic
tcagaggcggggcttgggct

SEQ ID NO: 3258 - DNA, 20 bp, Artificial Sequence
  Synthetic
ctcagaggcggggcttgggc

SEQ ID NO: 3259 - DNA, 20 bp, Artificial Sequence
  Synthetic
gctcagaggcggggcttggg

SEQ ID NO: 3260 - DNA, 20 bp, Artificial Sequence
  Synthetic
ggctcagaggcggggcttgg

SEQ ID NO: 3261 - DNA, 20 bp, Artificial Sequence
  Synthetic
gggctcagaggcggggcttg

SEQ ID NO: 3262 - DNA, 20 bp, Artificial Sequence
  Synthetic
ggggctcagaggcggggctt

SEQ ID NO: 3263 - DNA, 20 bp, Artificial Sequence
  Synthetic
cggggctcagaggcggggct

SEQ ID NO: 3264 - DNA, 20 bp, Artificial Sequence
  Synthetic
gcggggctcagaggcggggc

SEQ ID NO: 3265 - DNA, 20 bp, Artificial Sequence
  Synthetic
ggcggggctcagaggcgggg

SEQ ID NO: 3266 - DNA, 20 bp, Artificial Sequence
  Synthetic
gggcggggctcagaggcggg

SEQ ID NO: 3267 - DNA, 20 bp, Artificial Sequence
  Synthetic
tgggcggggctcagaggcgg

SEQ ID NO: 3268 - DNA, 20 bp, Artificial Sequence
  Synthetic
ttgggcggggctcagaggcg

SEQ ID NO: 3269 - DNA, 20 bp, Artificial Sequence
  Synthetic
gttgggcggggctcagaggc

SEQ ID NO: 3270 - DNA, 20 bp, Artificial Sequence
  Synthetic
ggttgggcggggctcagagg

SEQ ID NO: 3271 - DNA, 20 bp, Artificial Sequence
  Synthetic
gggttgggcggggctcagag

SEQ ID NO: 3272 - DNA, 20 bp, Artificial Sequence
  Synthetic
tgggttgggcggggctcaga

SEQ ID NO: 3273 - DNA, 20 bp, Artificial Sequence
  Synthetic
atgggttgggcggggctcag

SEQ ID NO: 3274 - DNA, 20 bp, Artificial Sequence
  Synthetic
aatgggttgggcggggctca

SEQ ID NO: 3275 - DNA, 20 bp, Artificial Sequence
  Synthetic
aaatgggttgggcggggctc

SEQ ID NO: 3276 - DNA, 20 bp, Artificial Sequence
  Synthetic
aaaatgggttgggcggggct

SEQ ID NO: 3277 - DNA, 20 bp, Artificial Sequence
  Synthetic
gaaaatgggttgggcggggc

SEQ ID NO: 3278 - DNA, 20 bp, Artificial Sequence
  Synthetic
ggaaaatgggttgggcgggg

SEQ ID NO: 3279 - DNA, 20 bp, Artificial Sequence
  Synthetic
cggaaaatgggttgggcggg

SEQ ID NO: 3280 - DNA, 20 bp, Artificial Sequence
  Synthetic
acggaaaatgggttgggcgg

SEQ ID NO: 3281 - DNA, 20 bp, Artificial Sequence
  Synthetic
aacggaaaatgggttgggcg

SEQ ID NO: 3282 - DNA, 20 bp, Artificial Sequence
  Synthetic
gaacggaaaatgggttgggc

SEQ ID NO: 3283 - DNA, 20 bp, Artificial Sequence
  Synthetic
ggaacggaaaatgggttggg

SEQ ID NO: 3284 - DNA, 20 bp, Artificial Sequence
  Synthetic
gggaacggaaaatgggttgg

SEQ ID NO: 3285 - DNA, 20 bp, Artificial Sequence
  Synthetic
tgggaacggaaaatgggttg

SEQ ID NO: 3286 - DNA, 20 bp, Artificial Sequence
  Synthetic
ctgggaacggaaaatgggtt

SEQ ID NO: 3287 - DNA, 20 bp, Artificial Sequence
  Synthetic
tctgggaacggaaaatgggt

SEQ ID NO: 3288 - DNA, 20 bp, Artificial Sequence
  Synthetic
ctctgggaacggaaaatggg

SEQ ID NO: 3289 - DNA, 20 bp, Artificial Sequence
  Synthetic
gctctgggaacggaaaatgg

SEQ ID NO: 3290 - DNA, 20 bp, Artificial Sequence
  Synthetic
tgctctgggaacggaaaatg

SEQ ID NO: 3291 - DNA, 20 bp, Artificial Sequence
  Synthetic
atgctctgggaacggaaaat

SEQ ID NO: 3292 - DNA, 20 bp, Artificial Sequence
  Synthetic
catgctctgggaacggaaaa

SEQ ID NO: 3293 - DNA, 20 bp, Artificial Sequence
  Synthetic
acatgctctgggaacggaaa

SEQ ID NO: 3294 - DNA, 20 bp, Artificial Sequence
  Synthetic
aacatgctctgggaacggaa

SEQ ID NO: 3295 - DNA, 20 bp, Artificial Sequence
  Synthetic
gaacatgctctgggaacgga

SEQ ID NO: 3296 - DNA, 20 bp, Artificial Sequence
  Synthetic
agaacatgctctgggaacgg

SEQ ID NO: 3297 - DNA, 20 bp, Artificial Sequence
  Synthetic
gagaacatgctctgggaacg

SEQ ID NO: 3298 - DNA, 20 bp, Artificial Sequence
  Synthetic
cgagaacatgctctgggaac

SEQ ID NO: 3299 - DNA, 20 bp, Artificial Sequence
  Synthetic
gcgagaacatgctctgggaa

SEQ ID NO: 3300 - DNA, 20 bp, Artificial Sequence
  Synthetic
ggcgagaacatgctctggga

SEQ ID NO: 3301 - DNA, 20 bp, Artificial Sequence
  Synthetic
tggcgagaacatgctctggg

SEQ ID NO: 3302 - DNA, 20 bp, Artificial Sequence
  Synthetic
ttggcgagaacatgctctgg

SEQ ID NO: 3303 - DNA, 20 bp, Artificial Sequence
  Synthetic
cttcttcctgcagtgggcgg

SEQ ID NO: 3304 - DNA, 20 bp, Artificial Sequence
  Synthetic
acttcttcctgcagtgggcg

SEQ ID NO: 3305 - DNA, 20 bp, Artificial Sequence
  Synthetic
cacttcttcctgcagtgggc

SEQ ID NO: 3306 - DNA, 20 bp, Artificial Sequence
  Synthetic
tcacttcttcctgcagtggg

SEQ ID NO: 3307 - DNA, 20 bp, Artificial Sequence
  Synthetic
ctcacttcttcctgcagtgg

SEQ ID NO: 3308 - DNA, 20 bp, Artificial Sequence
  Synthetic
actcacttcttcctgcagtg

SEQ ID NO: 3309 - DNA, 20 bp, Artificial Sequence
  Synthetic
cactcacttcttcctgcagt

SEQ ID NO: 3310 - DNA, 20 bp, Artificial Sequence
  Synthetic
ccactcacttcttcctgcag

SEQ ID NO: 3311 - DNA, 20 bp, Artificial Sequence
  Synthetic
cccactcacttcttcctgca

SEQ ID NO: 3312 - DNA, 20 bp, Artificial Sequence
  Synthetic
tcccactcacttcttcctgc

SEQ ID NO: 3313 - DNA, 20 bp, Artificial Sequence
  Synthetic
ctcccactcacttcttcctg

SEQ ID NO: 3314 - DNA, 20 bp, Artificial Sequence
  Synthetic
actcccactcacttcttcct

SEQ ID NO: 3315 - DNA, 20 bp, Artificial Sequence
  Synthetic
aactcccactcacttcttcc

SEQ ID NO: 3316 - DNA, 20 bp, Artificial Sequence
  Synthetic
gaactcccactcacttcttc

SEQ ID NO: 3317 - DNA, 20 bp, Artificial Sequence
  Synthetic
ggaactcccactcacttctt

SEQ ID NO: 3318 - DNA, 20 bp, Artificial Sequence
  Synthetic
tggaactcccactcacttct

SEQ ID NO: 3319 - DNA, 20 bp, Artificial Sequence
  Synthetic
ttggaactcccactcacttc

SEQ ID NO: 3320 - DNA, 20 bp, Artificial Sequence
  Synthetic
cttggaactcccactcactt

SEQ ID NO: 3321 - DNA, 20 bp, Artificial Sequence
  Synthetic
tcttggaactcccactcact

SEQ ID NO: 3322 - DNA, 20 bp, Artificial Sequence
  Synthetic
ctcttggaactcccactcac

SEQ ID NO: 3323 - DNA, 20 bp, Artificial Sequence
  Synthetic
cctcttggaactcccactca

SEQ ID NO: 3324 - DNA, 20 bp, Artificial Sequence
  Synthetic
tcctcttggaactcccactc

SEQ ID NO: 3325 - DNA, 20 bp, Artificial Sequence
  Synthetic
ctcctcttggaactcccact

SEQ ID NO: 3326 - DNA, 20 bp, Artificial Sequence
  Synthetic
cctcctcttggaactcccac

SEQ ID NO: 3327 - DNA, 20 bp, Artificial Sequence
  Synthetic
ccctcctcttggaactccca

SEQ ID NO: 3328 - DNA, 20 bp, Artificial Sequence
  Synthetic
accctcctcttggaactccc

SEQ ID NO: 3329 - DNA, 20 bp, Artificial Sequence
  Synthetic
aaccctcctcttggaactcc

SEQ ID NO: 3330 - DNA, 20 bp, Artificial Sequence
  Synthetic
caaccctcctcttggaactc

SEQ ID NO: 3331 - DNA, 20 bp, Artificial Sequence
  Synthetic
ccaaccctcctcttggaact

SEQ ID NO: 3332 - DNA, 20 bp, Artificial Sequence
  Synthetic
accaaccctcctcttggaac

SEQ ID NO: 3333 - DNA, 20 bp, Artificial Sequence
  Synthetic
caccaaccctcctcttggaa

SEQ ID NO: 3334 - DNA, 20 bp, Artificial Sequence
  Synthetic
ccaccaaccctcctcttgga

SEQ ID NO: 3335 - DNA, 20 bp, Artificial Sequence
  Synthetic
cccaccaaccctcctcttgg

SEQ ID NO: 3336 - DNA, 20 bp, Artificial Sequence
  Synthetic
ccccaccaaccctcctcttg

SEQ ID NO: 3337 - DNA, 20 bp, Artificial Sequence
  Synthetic
tccccaccaaccctcctctt

SEQ ID NO: 3338 - DNA, 20 bp, Artificial Sequence
  Synthetic
gtccccaccaaccctcctct

SEQ ID NO: 3339 - DNA, 20 bp, Artificial Sequence
  Synthetic
cgtccccaccaaccctcctc

SEQ ID NO: 3340 - DNA, 20 bp, Artificial Sequence
  Synthetic
ccgtccccaccaaccctcct

SEQ ID NO: 3341 - DNA, 20 bp, Artificial Sequence
  Synthetic
cccgtccccaccaaccctcc

SEQ ID NO: 3342 - DNA, 20 bp, Artificial Sequence
  Synthetic
ccccgtccccaccaaccctc

SEQ ID NO: 3343 - DNA, 20 bp, Artificial Sequence
  Synthetic
tccccgtccccaccaaccct

SEQ ID NO: 3344 - DNA, 20 bp, Artificial Sequence
  Synthetic
ttccccgtccccaccaaccc

SEQ ID NO: 3345 - DNA, 20 bp, Artificial Sequence
  Synthetic
cttccccgtccccaccaacc

SEQ ID NO: 3346 - DNA, 20 bp, Artificial Sequence
  Synthetic
acttccccgtccccaccaac

SEQ ID NO: 3347 - DNA, 20 bp, Artificial Sequence
  Synthetic
cacttccccgtccccaccaa

SEQ ID NO: 3348 - DNA, 20 bp, Artificial Sequence
  Synthetic
ccacttccccgtccccacca

SEQ ID NO: 3349 - DNA, 20 bp, Artificial Sequence
  Synthetic
cccacttccccgtccccacc

SEQ ID NO: 3350 - DNA, 20 bp, Artificial Sequence
  Synthetic
ccccacttccccgtccccac

SEQ ID NO: 3351 - DNA, 20 bp, Artificial Sequence
  Synthetic
cccccacttccccgtcccca

SEQ ID NO: 3352 - DNA, 20 bp, Artificial Sequence
  Synthetic
acccccacttccccgtcccc

SEQ ID NO: 3353 - DNA, 20 bp, Artificial Sequence
  Synthetic
cacccccacttccccgtccc

SEQ ID NO: 3354 - DNA, 20 bp, Artificial Sequence
  Synthetic
ccacccccacttccccgtcc

SEQ ID NO: 3355 - DNA, 20 bp, Artificial Sequence
  Synthetic
cccacccccacttccccgtc

SEQ ID NO: 3356 - DNA, 20 bp, Artificial Sequence
  Synthetic
ccccacccccacttccccgt

SEQ ID NO: 3357 - DNA, 20 bp, Artificial Sequence
  Synthetic
cccccacccccacttccccg

SEQ ID NO: 3358 - DNA, 20 bp, Artificial Sequence
  Synthetic
acccccacccccacttcccc

SEQ ID NO: 3359 - DNA, 20 bp, Artificial Sequence
  Synthetic
cacccccacccccacttccc

SEQ ID NO: 3360 - DNA, 20 bp, Artificial Sequence
  Synthetic
ccacccccacccccacttcc

SEQ ID NO: 3361 - DNA, 20 bp, Artificial Sequence
  Synthetic
cccacccccacccccacttc

SEQ ID NO: 3362 - DNA, 20 bp, Artificial Sequence
  Synthetic
ccccacccccacccccactt

SEQ ID NO: 3363 - DNA, 20 bp, Artificial Sequence
  Synthetic
tccccacccccacccccact

SEQ ID NO: 3364 - DNA, 20 bp, Artificial Sequence
  Synthetic
ttccccacccccacccccac

SEQ ID NO: 3365 - DNA, 20 bp, Artificial Sequence
  Synthetic
cttccccacccccaccccca

SEQ ID NO: 3366 - DNA, 20 bp, Artificial Sequence
  Synthetic
acttccccacccccaccccc

SEQ ID NO: 3367 - DNA, 20 bp, Artificial Sequence
  Synthetic
cacttccccacccccacccc

SEQ ID NO: 3368 - DNA, 20 bp, Artificial Sequence
  Synthetic
ccacttccccacccccaccc

SEQ ID NO: 3369 - DNA, 20 bp, Artificial Sequence
  Synthetic
cccacttccccacccccacc

SEQ ID NO: 3370 - DNA, 20 bp, Artificial Sequence
  Synthetic
ccccacttccccacccccac

SEQ ID NO: 3371 - DNA, 20 bp, Artificial Sequence
  Synthetic
cccccacttccccaccccca

SEQ ID NO: 3372 - DNA, 20 bp, Artificial Sequence
  Synthetic
acccccacttccccaccccc

SEQ ID NO: 3373 - DNA, 20 bp, Artificial Sequence
  Synthetic
cacccccacttccccacccc

SEQ ID NO: 3374 - DNA, 20 bp, Artificial Sequence
  Synthetic
ccacccccacttccccaccc

SEQ ID NO: 3375 - DNA, 20 bp, Artificial Sequence
  Synthetic
cccacccccacttccccacc

SEQ ID NO: 3376 - DNA, 20 bp, Artificial Sequence
  Synthetic
ccccacccccacttccccac

SEQ ID NO: 3377 - DNA, 20 bp, Artificial Sequence
  Synthetic
cccccacccccacttcccca

SEQ ID NO: 3378 - DNA, 20 bp, Artificial Sequence
  Synthetic
acacccccacccccacttcc

SEQ ID NO: 3379 - DNA, 20 bp, Artificial Sequence
  Synthetic
gacacccccacccccacttc

SEQ ID NO: 3380 - DNA, 20 bp, Artificial Sequence
  Synthetic
tgacacccccacccccactt

SEQ ID NO: 3381 - DNA, 20 bp, Artificial Sequence
  Synthetic
atgacacccccacccccact

SEQ ID NO: 3382 - DNA, 20 bp, Artificial Sequence
  Synthetic
catgacacccccacccccac

SEQ ID NO: 3383 - DNA, 20 bp, Artificial Sequence
  Synthetic
ccatgacacccccaccccca

SEQ ID NO: 3384 - DNA, 20 bp, Artificial Sequence
  Synthetic
tccatgacacccccaccccc

SEQ ID NO: 3385 - DNA, 20 bp, Artificial Sequence
  Synthetic
ctccatgacacccccacccc

SEQ ID NO: 3386 - DNA, 20 bp, Artificial Sequence
  Synthetic
cctccatgacacccccaccc

SEQ ID NO: 3387 - DNA, 20 bp, Artificial Sequence
  Synthetic
acctccatgacacccccacc

SEQ ID NO: 3388 - DNA, 20 bp, Artificial Sequence
  Synthetic
cacctccatgacacccccac

SEQ ID NO: 3389 - DNA, 20 bp, Artificial Sequence
  Synthetic
tcacctccatgacaccccca

SEQ ID NO: 3390 - DNA, 20 bp, Artificial Sequence
  Synthetic
ctcacctccatgacaccccc

SEQ ID NO: 3391 - DNA, 20 bp, Artificial Sequence
  Synthetic
cctcacctccatgacacccc

SEQ ID NO: 3392 - DNA, 20 bp, Artificial Sequence
  Synthetic
ccctcacctccatgacaccc

SEQ ID NO: 3393 - DNA, 20 bp, Artificial Sequence
  Synthetic
gccctcacctccatgacacc

SEQ ID NO: 3394 - DNA, 20 bp, Artificial Sequence
  Synthetic
agccctcacctccatgacac

SEQ ID NO: 3395 - DNA, 20 bp, Artificial Sequence
  Synthetic
cagccctcacctccatgaca

SEQ ID NO: 3396 - DNA, 20 bp, Artificial Sequence
  Synthetic
ccagccctcacctccatgac

SEQ ID NO: 3397 - DNA, 20 bp, Artificial Sequence
  Synthetic
accagccctcacctccatga

SEQ ID NO: 3398 - DNA, 20 bp, Artificial Sequence
  Synthetic
caccagccctcacctccatg

SEQ ID NO: 3399 - DNA, 20 bp, Artificial Sequence
  Synthetic
ccaccagccctcacctccat

SEQ ID NO: 3400 - DNA, 20 bp, Artificial Sequence
  Synthetic
cccaccagccctcacctcca

SEQ ID NO: 3401 - DNA, 17 bp, Artificial Sequence
  Synthetic
ugggctccaaaatcuuc

SEQ ID NO: 3402 - DNA, 17 bp, Artificial Sequence
  Synthetic
cugggctccaaaatcuu

SEQ ID NO: 3403 - DNA, 17 bp, Artificial Sequence
  Synthetic
gcugggctccaaaaucu

SEQ ID NO: 3404 - DNA, 17 bp, Artificial Sequence
  Synthetic
agcugggctccaaaauc

SEQ ID NO: 3405 - DNA, 17 bp, Artificial Sequence
  Synthetic
cagctgggctccaaaau

SEQ ID NO: 3406 - DNA, 17 bp, Artificial Sequence
  Synthetic
acagctgggctccaaaa

SEQ ID NO: 3407 - DNA, 17 bp, Artificial Sequence
  Synthetic
cacagctgggctccaaa

SEQ ID NO: 3408 - DNA, 17 bp, Artificial Sequence
  Synthetic
acacagctgggctccaa

SEQ ID NO: 3409 - DNA, 17 bp, Artificial Sequence
  Synthetic
cacacagctgggctcca

SEQ ID NO: 3410 - DNA, 17 bp, Artificial Sequence
  Synthetic
gcacacagctgggcucc

SEQ ID NO: 3411 - DNA, 17 bp, Artificial Sequence
  Synthetic
ggcacacagctgggcuc

SEQ ID NO: 3412 - DNA, 17 bp, Artificial Sequence
  Synthetic
uggcacacagctgggcu

SEQ ID NO: 3413 - DNA, 17 bp, Artificial Sequence
  Synthetic
cuggcacacagctgggc

SEQ ID NO: 3414 - DNA, 17 bp, Artificial Sequence
  Synthetic
gcuggcacacagctggg

SEQ ID NO: 3415 - RNA, 17 nt, Artificial Sequence
  Synthetic
ggcuggcacacagcugg

SEQ ID NO: 3416 - DNA, 17 bp, Artificial Sequence
  Synthetic
gggctggcacacagcug

SEQ ID NO: 3417 - DNA, 17 bp, Artificial Sequence
  Synthetic
ugggctggcacacagcu

SEQ ID NO: 3418 - DNA, 17 bp, Artificial Sequence
  Synthetic
uugggctggcacacagc

SEQ ID NO: 3419 - DNA, 17 bp, Artificial Sequence
  Synthetic
cuugggctggcacacag

SEQ ID NO: 3420 - DNA, 17 bp, Artificial Sequence
  Synthetic
acuugggctggcacaca

SEQ ID NO: 3421 - DNA, 17 bp, Artificial Sequence
  Synthetic
gacutgggctggcacac

SEQ ID NO: 3422 - DNA, 17 bp, Artificial Sequence
  Synthetic
cgacttgggctggcaca

SEQ ID NO: 3423 - DNA, 17 bp, Artificial Sequence
  Synthetic
ccgacttgggctggcac

SEQ ID NO: 3424 - DNA, 17 bp, Artificial Sequence
  Synthetic
uccgacttgggctggca

SEQ ID NO: 3425 - DNA, 17 bp, Artificial Sequence
  Synthetic
uuccgacttgggctggc

SEQ ID NO: 3426 - DNA, 17 bp, Artificial Sequence
  Synthetic
guuccgacttgggcugg

SEQ ID NO: 3427 - DNA, 17 bp, Artificial Sequence
  Synthetic
aguuccgacttgggcug

SEQ ID NO: 3428 - DNA, 17 bp, Artificial Sequence
  Synthetic
aagutccgacttgggcu

SEQ ID NO: 3429 - DNA, 17 bp, Artificial Sequence
  Synthetic
caagttccgacttgggc

SEQ ID NO: 3430 - DNA, 17 bp, Artificial Sequence
  Synthetic
ccaagttccgacttggg

SEQ ID NO: 3431 - DNA, 17 bp, Artificial Sequence
  Synthetic
uccaagttccgactugg

SEQ ID NO: 3432 - DNA, 17 bp, Artificial Sequence
  Synthetic
auccaagttccgacuug

SEQ ID NO: 3433 - DNA, 17 bp, Artificial Sequence
  Synthetic
gauccaagttccgacuu

SEQ ID NO: 3434 - DNA, 17 bp, Artificial Sequence
  Synthetic
ugauccaagttccgacu

SEQ ID NO: 3435 - DNA, 17 bp, Artificial Sequence
  Synthetic
gugatccaagttccgac

SEQ ID NO: 3436 - DNA, 17 bp, Artificial Sequence
  Synthetic
ugugatccaagttccga

SEQ ID NO: 3437 - DNA, 17 bp, Artificial Sequence
  Synthetic
augugatccaagttccg

SEQ ID NO: 3438 - DNA, 17 bp, Artificial Sequence
  Synthetic
gaugtgatccaagtucc

SEQ ID NO: 3439 - DNA, 17 bp, Artificial Sequence
  Synthetic
ugaugtgatccaaguuc

SEQ ID NO: 3440 - DNA, 17 bp, Artificial Sequence
  Synthetic
cugatgtgatccaaguu

SEQ ID NO: 3441 - DNA, 17 bp, Artificial Sequence
  Synthetic
ucugatgtgatccaagu

SEQ ID NO: 3442 - DNA, 17 bp, Artificial Sequence
  Synthetic
aucugatgtgatccaag

SEQ ID NO: 3443 - DNA, 17 bp, Artificial Sequence
  Synthetic
gauctgatgtgatccaa

SEQ ID NO: 3444 - DNA, 17 bp, Artificial Sequence
  Synthetic
ggauctgatgtgatcca

SEQ ID NO: 3445 - DNA, 17 bp, Artificial Sequence
  Synthetic
aggatctgatgtgaucc

SEQ ID NO: 3446 - DNA, 17 bp, Artificial Sequence
  Synthetic
gaggatctgatgtgauc

SEQ ID NO: 3447 - DNA, 17 bp, Artificial Sequence
  Synthetic
agaggatctgatgtgau

SEQ ID NO: 3448 - DNA, 17 bp, Artificial Sequence
  Synthetic
gagaggatctgatguga

SEQ ID NO: 3449 - DNA, 17 bp, Artificial Sequence
  Synthetic
cgagaggatctgatgug

SEQ ID NO: 3450 - DNA, 17 bp, Artificial Sequence
  Synthetic
ucgagaggatctgaugu

SEQ ID NO: 3451 - DNA, 17 bp, Artificial Sequence
  Synthetic
cucgagaggatctgaug

SEQ ID NO: 3452 - DNA, 17 bp, Artificial Sequence
  Synthetic
gcucgagaggatctgau

SEQ ID NO: 3453 - DNA, 17 bp, Artificial Sequence
  Synthetic
agcucgagaggatcuga

SEQ ID NO: 3454 - DNA, 17 bp, Artificial Sequence
  Synthetic
gagctcgagaggatcug

SEQ ID NO: 3455 - DNA, 17 bp, Artificial Sequence
  Synthetic
ggagctcgagaggaucu

SEQ ID NO: 3456 - DNA, 17 bp, Artificial Sequence
  Synthetic
uggagctcgagaggauc

SEQ ID NO: 3457 - DNA, 17 bp, Artificial Sequence
  Synthetic
cuggagctcgagaggau

SEQ ID NO: 3458 - DNA, 17 bp, Artificial Sequence
  Synthetic
gcuggagctcgagagga

SEQ ID NO: 3459 - DNA, 17 bp, Artificial Sequence
  Synthetic
ugcuggagctcgagagg

SEQ ID NO: 3460 - DNA, 17 bp, Artificial Sequence
  Synthetic
cugctggagctcgagag

SEQ ID NO: 3461 - DNA, 17 bp, Artificial Sequence
  Synthetic
ccugctggagctcgaga

SEQ ID NO: 3462 - DNA, 17 bp, Artificial Sequence
  Synthetic
uccugctggagctcgag

SEQ ID NO: 3463 - DNA, 17 bp, Artificial Sequence
  Synthetic
cucctgctggagctcga

SEQ ID NO: 3464 - DNA, 17 bp, Artificial Sequence
  Synthetic
ucucctgctggagcucg

SEQ ID NO: 3465 - DNA, 17 bp, Artificial Sequence
  Synthetic
cucucctgctggagcuc

SEQ ID NO: 3466 - DNA, 17 bp, Artificial Sequence
  Synthetic
ccuctcctgctggagcu

SEQ ID NO: 3467 - DNA, 17 bp, Artificial Sequence
  Synthetic
gccuctcctgctggagc

SEQ ID NO: 3468 - DNA, 17 bp, Artificial Sequence
  Synthetic
ggcctctcctgctggag

SEQ ID NO: 3469 - DNA, 17 bp, Artificial Sequence
  Synthetic
gggcctctcctgctgga

SEQ ID NO: 3470 - DNA, 17 bp, Artificial Sequence
  Synthetic
agggcctctcctgcugg

SEQ ID NO: 3471 - DNA, 17 bp, Artificial Sequence
  Synthetic
aagggcctctcctgcug

SEQ ID NO: 3472 - DNA, 17 bp, Artificial Sequence
  Synthetic
gaagggcctctcctgcu

SEQ ID NO: 3473 - DNA, 17 bp, Artificial Sequence
  Synthetic
ggaagggcctctccugc

SEQ ID NO: 3474 - DNA, 17 bp, Artificial Sequence
  Synthetic
aggaagggcctctccug

SEQ ID NO: 3475 - DNA, 17 bp, Artificial Sequence
  Synthetic
gaggaagggcctctccu

SEQ ID NO: 3476 - DNA, 17 bp, Artificial Sequence
  Synthetic
cgaggaagggcctcucc

SEQ ID NO: 3477 - DNA, 17 bp, Artificial Sequence
  Synthetic
gcgaggaagggcctcuc

SEQ ID NO: 3478 - RNA, 17 nt, Artificial Sequence
  Synthetic
ggcgaggaagggccucu

SEQ ID NO: 3479 - RNA, 17 nt, Artificial Sequence
  Synthetic
aggcgaggaagggccuc

SEQ ID NO: 3480 - RNA, 17 nt, Artificial Sequence
  Synthetic
caggcgaggaagggccu

SEQ ID NO: 3481 - DNA, 17 bp, Artificial Sequence
  Synthetic
ccaggcgaggaagggcc

SEQ ID NO: 3482 - DNA, 17 bp, Artificial Sequence
  Synthetic
gccaggcgaggaagggc

SEQ ID NO: 3483 - RNA, 17 nt, Artificial Sequence
  Synthetic
ugccaggcgaggaaggg

SEQ ID NO: 3484 - RNA, 17 nt, Artificial Sequence
  Synthetic
cugccaggcgaggaagg

SEQ ID NO: 3485 - RNA, 17 nt, Artificial Sequence
  Synthetic
gcugccaggcgaggaag

SEQ ID NO: 3486 - RNA, 17 nt, Artificial Sequence
  Synthetic
ggcugccaggcgaggaa

SEQ ID NO: 3487 - DNA, 17 bp, Artificial Sequence
  Synthetic
gggctgccaggcgagga

SEQ ID NO: 3488 - DNA, 17 bp, Artificial Sequence
  Synthetic
ggggctgccaggcgagg

SEQ ID NO: 3489 - DNA, 17 bp, Artificial Sequence
  Synthetic
aggggctgccaggcgag

SEQ ID NO: 3490 - DNA, 17 bp, Artificial Sequence
  Synthetic
caggggctgccaggcga

SEQ ID NO: 3491 - DNA, 17 bp, Artificial Sequence
  Synthetic
ucaggggctgccaggcg

SEQ ID NO: 3492 - DNA, 17 bp, Artificial Sequence
  Synthetic
cucaggggctgccaggc

SEQ ID NO: 3493 - DNA, 17 bp, Artificial Sequence
  Synthetic
gcucaggggctgccagg

SEQ ID NO: 3494 - DNA, 17 bp, Artificial Sequence
  Synthetic
cgcucaggggctgccag

SEQ ID NO: 3495 - DNA, 17 bp, Artificial Sequence
  Synthetic
ccgctcaggggctgcca

SEQ ID NO: 3496 - DNA, 17 bp, Artificial Sequence
  Synthetic
gccgctcaggggctgcc

SEQ ID NO: 3497 - DNA, 17 bp, Artificial Sequence
  Synthetic
agccgctcaggggcugc

SEQ ID NO: 3498 - DNA, 17 bp, Artificial Sequence
  Synthetic
gagccgctcaggggcug

SEQ ID NO: 3499 - DNA, 17 bp, Artificial Sequence
  Synthetic
ugagccgctcaggggcu

SEQ ID NO: 3500 - DNA, 17 bp, Artificial Sequence
  Synthetic
cugagccgctcaggggc

SEQ ID NO: 3501 - DNA, 17 bp, Artificial Sequence
  Synthetic
gcugagccgctcagggg

SEQ ID NO: 3502 - DNA, 17 bp, Artificial Sequence
  Synthetic
ugcugagccgctcaggg

SEQ ID NO: 3503 - DNA, 17 bp, Artificial Sequence
  Synthetic
cugctgagccgctcagg

SEQ ID NO: 3504 - DNA, 17 bp, Artificial Sequence
  Synthetic
ccugctgagccgctcag

SEQ ID NO: 3505 - DNA, 17 bp, Artificial Sequence
  Synthetic
cccugctgagccgcuca

SEQ ID NO: 3506 - DNA, 17 bp, Artificial Sequence
  Synthetic
gccctgctgagccgcuc

SEQ ID NO: 3507 - DNA, 17 bp, Artificial Sequence
  Synthetic
ugccctgctgagccgcu

SEQ ID NO: 3508 - DNA, 17 bp, Artificial Sequence
  Synthetic
gugccctgctgagccgc

SEQ ID NO: 3509 - DNA, 17 bp, Artificial Sequence
  Synthetic
ggugccctgctgagccg

SEQ ID NO: 3510 - DNA, 17 bp, Artificial Sequence
  Synthetic
uggugccctgctgagcc

SEQ ID NO: 3511 - DNA, 17 bp, Artificial Sequence
  Synthetic
auggtgccctgctgagc

SEQ ID NO: 3512 - DNA, 17 bp, Artificial Sequence
  Synthetic
cauggtgccctgctgag

SEQ ID NO: 3513 - DNA, 17 bp, Artificial Sequence
  Synthetic
ccauggtgccctgcuga

SEQ ID NO: 3514 - DNA, 17 bp, Artificial Sequence
  Synthetic
gccatggtgccctgcug

SEQ ID NO: 3515 - DNA, 17 bp, Artificial Sequence
  Synthetic
ugccatggtgccctgcu

SEQ ID NO: 3516 - DNA, 17 bp, Artificial Sequence
  Synthetic
uugccatggtgcccugc

SEQ ID NO: 3517 - DNA, 17 bp, Artificial Sequence
  Synthetic
cuugccatggtgcccug

SEQ ID NO: 3518 - DNA, 17 bp, Artificial Sequence
  Synthetic
ucuugccatggtgcccu

SEQ ID NO: 3519 - DNA, 17 bp, Artificial Sequence
  Synthetic
aucutgccatggtgccc

SEQ ID NO: 3520 - DNA, 17 bp, Artificial Sequence
  Synthetic
gaucttgccatggtgcc

SEQ ID NO: 3521 - DNA, 17 bp, Artificial Sequence
  Synthetic
ggaucttgccatggugc

SEQ ID NO: 3522 - DNA, 17 bp, Artificial Sequence
  Synthetic
gggatcttgccatggug

SEQ ID NO: 3523 - DNA, 17 bp, Artificial Sequence
  Synthetic
agggatcttgccatggu

SEQ ID NO: 3524 - DNA, 17 bp, Artificial Sequence
  Synthetic
aagggatcttgccaugg

SEQ ID NO: 3525 - DNA, 17 bp, Artificial Sequence
  Synthetic
gaagggatcttgccaug

SEQ ID NO: 3526 - DNA, 17 bp, Artificial Sequence
  Synthetic
agaagggatcttgccau

SEQ ID NO: 3527 - DNA, 17 bp, Artificial Sequence
  Synthetic
gagaagggatcttgcca

SEQ ID NO: 3528 - DNA, 17 bp, Artificial Sequence
  Synthetic
ggagaagggatcttgcc

SEQ ID NO: 3529 - DNA, 17 bp, Artificial Sequence
  Synthetic
aggagaagggatctugc

SEQ ID NO: 3530 - DNA, 17 bp, Artificial Sequence
  Synthetic
caggagaagggatcuug

SEQ ID NO: 3531 - DNA, 17 bp, Artificial Sequence
  Synthetic
gcaggagaagggatcuu

SEQ ID NO: 3532 - RNA, 17 nt, Artificial Sequence
  Synthetic
ggcaggagaagggaucu

SEQ ID NO: 3533 - RNA, 17 nt, Artificial Sequence
  Synthetic
gggcaggagaagggauc

SEQ ID NO: 3534 - RNA, 17 nt, Artificial Sequence
  Synthetic
ggggcaggagaagggau

SEQ ID NO: 3535 - DNA, 17 bp, Artificial Sequence
  Synthetic
aggggcaggagaaggga

SEQ ID NO: 3536 - DNA, 17 bp, Artificial Sequence
  Synthetic
caggggcaggagaaggg

SEQ ID NO: 3537 - DNA, 17 bp, Artificial Sequence
  Synthetic
gcaggggcaggagaagg

SEQ ID NO: 3538 - RNA, 17 nt, Artificial Sequence
  Synthetic
ugcaggggcaggagaag

SEQ ID NO: 3539 - RNA, 17 nt, Artificial Sequence
  Synthetic
cugcaggggcaggagaa

SEQ ID NO: 3540 - RNA, 17 nt, Artificial Sequence
  Synthetic
ucugcaggggcaggaga

SEQ ID NO: 3541 - RNA, 17 nt, Artificial Sequence
  Synthetic
aucugcaggggcaggag

SEQ ID NO: 3542 - DNA, 17 bp, Artificial Sequence
  Synthetic
gauctgcaggggcagga

SEQ ID NO: 3543 - DNA, 17 bp, Artificial Sequence
  Synthetic
agauctgcaggggcagg

SEQ ID NO: 3544 - DNA, 17 bp, Artificial Sequence
  Synthetic
aagatctgcaggggcag

SEQ ID NO: 3545 - DNA, 17 bp, Artificial Sequence
  Synthetic
uaagatctgcaggggca

SEQ ID NO: 3546 - DNA, 17 bp, Artificial Sequence
  Synthetic
guaagatctgcaggggc

SEQ ID NO: 3547 - DNA, 17 bp, Artificial Sequence
  Synthetic
aguaagatctgcagggg

SEQ ID NO: 3548 - DNA, 17 bp, Artificial Sequence
  Synthetic
caguaagatctgcaggg

SEQ ID NO: 3549 - DNA, 17 bp, Artificial Sequence
  Synthetic
gcagtaagatctgcagg

SEQ ID NO: 3550 - DNA, 17 bp, Artificial Sequence
  Synthetic
agcagtaagatctgcag

SEQ ID NO: 3551 - DNA, 17 bp, Artificial Sequence
  Synthetic
uagcagtaagatctgca

SEQ ID NO: 3552 - DNA, 17 bp, Artificial Sequence
  Synthetic
auagcagtaagatcugc

SEQ ID NO: 3553 - DNA, 17 bp, Artificial Sequence
  Synthetic
gauagcagtaagatcug

SEQ ID NO: 3554 - DNA, 17 bp, Artificial Sequence
  Synthetic
ggauagcagtaagaucu

SEQ ID NO: 3555 - DNA, 17 bp, Artificial Sequence
  Synthetic
aggatagcagtaagauc

SEQ ID NO: 3556 - DNA, 17 bp, Artificial Sequence
  Synthetic
aaggatagcagtaagau

SEQ ID NO: 3557 - DNA, 17 bp, Artificial Sequence
  Synthetic
uaaggatagcagtaaga

SEQ ID NO: 3558 - DNA, 17 bp, Artificial Sequence
  Synthetic
cuaaggatagcagtaag

SEQ ID NO: 3559 - DNA, 17 bp, Artificial Sequence
  Synthetic
gcuaaggatagcaguaa

SEQ ID NO: 3560 - DNA, 17 bp, Artificial Sequence
  Synthetic
ggcuaaggatagcagua

SEQ ID NO: 3561 - DNA, 17 bp, Artificial Sequence
  Synthetic
aggctaaggatagcagu

SEQ ID NO: 3562 - DNA, 17 bp, Artificial Sequence
  Synthetic
aaggctaaggatagcag

SEQ ID NO: 3563 - DNA, 17 bp, Artificial Sequence
  Synthetic
caaggctaaggatagca

SEQ ID NO: 3564 - DNA, 17 bp, Artificial Sequence
  Synthetic
ccaaggctaaggatagc

SEQ ID NO: 3565 - DNA, 17 bp, Artificial Sequence
  Synthetic
uccaaggctaaggauag

SEQ ID NO: 3566 - DNA, 17 bp, Artificial Sequence
  Synthetic
uuccaaggctaaggaua

SEQ ID NO: 3567 - DNA, 17 bp, Artificial Sequence
  Synthetic
uuuccaaggctaaggau

SEQ ID NO: 3568 - DNA, 17 bp, Artificial Sequence
  Synthetic
guuuccaaggctaagga

SEQ ID NO: 3569 - DNA, 17 bp, Artificial Sequence
  Synthetic
aguutccaaggctaagg

SEQ ID NO: 3570 - DNA, 17 bp, Artificial Sequence
  Synthetic
caguttccaaggctaag

SEQ ID NO: 3571 - DNA, 17 bp, Artificial Sequence
  Synthetic
gcagtttccaaggcuaa

SEQ ID NO: 3572 - DNA, 17 bp, Artificial Sequence
  Synthetic
ugcagtttccaaggcua

SEQ ID NO: 3573 - DNA, 17 bp, Artificial Sequence
  Synthetic
cugcagtttccaaggcu

SEQ ID NO: 3574 - DNA, 17 bp, Artificial Sequence
  Synthetic
ccugcagtttccaaggc

SEQ ID NO: 3575 - DNA, 17 bp, Artificial Sequence
  Synthetic
uccugcagtttccaagg

SEQ ID NO: 3576 - DNA, 17 bp, Artificial Sequence
  Synthetic
cucctgcagtttccaag

SEQ ID NO: 3577 - DNA, 17 bp, Artificial Sequence
  Synthetic
ucucctgcagtttccaa

SEQ ID NO: 3578 - DNA, 17 bp, Artificial Sequence
  Synthetic
uucucctgcagtttcca

SEQ ID NO: 3579 - DNA, 17 bp, Artificial Sequence
  Synthetic
cuuctcctgcagttucc

SEQ ID NO: 3580 - DNA, 17 bp, Artificial Sequence
  Synthetic
ucuuctcctgcagtuuc

SEQ ID NO: 3581 - DNA, 17 bp, Artificial Sequence
  Synthetic
uucutctcctgcaguuu

SEQ ID NO: 3582 - DNA, 17 bp, Artificial Sequence
  Synthetic
cuucttctcctgcaguu

SEQ ID NO: 3583 - DNA, 17 bp, Artificial Sequence
  Synthetic
gcuucttctcctgcagu

SEQ ID NO: 3584 - DNA, 17 bp, Artificial Sequence
  Synthetic
ggcutcttctcctgcag

SEQ ID NO: 3585 - DNA, 17 bp, Artificial Sequence
  Synthetic
gggcttcttctcctgca

SEQ ID NO: 3586 - DNA, 17 bp, Artificial Sequence
  Synthetic
ugggcttcttctccugc

SEQ ID NO: 3587 - DNA, 17 bp, Artificial Sequence
  Synthetic
cugggcttcttctccug

SEQ ID NO: 3588 - DNA, 17 bp, Artificial Sequence
  Synthetic
ccugggcttcttctccu

SEQ ID NO: 3589 - DNA, 17 bp, Artificial Sequence
  Synthetic
cccugggcttcttcucc

SEQ ID NO: 3590 - DNA, 17 bp, Artificial Sequence
  Synthetic
accctgggcttcttcuc

SEQ ID NO: 3591 - DNA, 17 bp, Artificial Sequence
  Synthetic
caccctgggcttctucu

SEQ ID NO: 3592 - DNA, 17 bp, Artificial Sequence
  Synthetic
ucaccctgggcttcuuc

SEQ ID NO: 3593 - DNA, 17 bp, Artificial Sequence
  Synthetic
gucaccctgggcttcuu

SEQ ID NO: 3594 - DNA, 17 bp, Artificial Sequence
  Synthetic
ugucaccctgggctucu

SEQ ID NO: 3595 - DNA, 17 bp, Artificial Sequence
  Synthetic
uugucaccctgggcuuc

SEQ ID NO: 3596 - DNA, 17 bp, Artificial Sequence
  Synthetic
cuugtcaccctgggcuu

SEQ ID NO: 3597 - DNA, 17 bp, Artificial Sequence
  Synthetic
ucuugtcaccctgggcu

SEQ ID NO: 3598 - DNA, 17 bp, Artificial Sequence
  Synthetic
aucutgtcaccctgggc

SEQ ID NO: 3599 - DNA, 17 bp, Artificial Sequence
  Synthetic
aaucttgtcaccctggg

SEQ ID NO: 3600 - DNA, 17 bp, Artificial Sequence
  Synthetic
uaaucttgtcacccugg

SEQ ID NO: 3601 - DNA, 17 bp, Artificial Sequence
  Synthetic
auaatcttgtcacccug

SEQ ID NO: 3602 - DNA, 17 bp, Artificial Sequence
  Synthetic
aauaatcttgtcacccu

SEQ ID NO: 3603 - DNA, 17 bp, Artificial Sequence
  Synthetic
caauaatcttgtcaccc

SEQ ID NO: 3604 - DNA, 17 bp, Artificial Sequence
  Synthetic
ucaataatcttgtcacc

SEQ ID NO: 3605 - DNA, 17 bp, Artificial Sequence
  Synthetic
aucaataatcttgtcac

SEQ ID NO: 3606 - DNA, 17 bp, Artificial Sequence
  Synthetic
caucaataatcttguca

SEQ ID NO: 3607 - DNA, 17 bp, Artificial Sequence
  Synthetic
ccaucaataatcttguc

SEQ ID NO: 3608 - DNA, 17 bp, Artificial Sequence
  Synthetic
gccatcaataatctugu

SEQ ID NO: 3609 - DNA, 17 bp, Artificial Sequence
  Synthetic
cgccatcaataatcuug

SEQ ID NO: 3610 - DNA, 17 bp, Artificial Sequence
  Synthetic
gcgccatcaataatcuu

SEQ ID NO: 3611 - DNA, 17 bp, Artificial Sequence
  Synthetic
ggcgccatcaataaucu

SEQ ID NO: 3612 - DNA, 17 bp, Artificial Sequence
  Synthetic
gggcgccatcaataauc

SEQ ID NO: 3613 - DNA, 17 bp, Artificial Sequence
  Synthetic
ggggcgccatcaataau

SEQ ID NO: 3614 - DNA, 17 bp, Artificial Sequence
  Synthetic
uggggcgccatcaauaa

SEQ ID NO: 3615 - DNA, 17 bp, Artificial Sequence
  Synthetic
auggggcgccatcaaua

SEQ ID NO: 3616 - DNA, 17 bp, Artificial Sequence
  Synthetic
cauggggcgccatcaau

SEQ ID NO: 3617 - DNA, 17 bp, Artificial Sequence
  Synthetic
acauggggcgccatcaa

SEQ ID NO: 3618 - DNA, 17 bp, Artificial Sequence
  Synthetic
cacatggggcgccauca

SEQ ID NO: 3619 - DNA, 17 bp, Artificial Sequence
  Synthetic
gcacatggggcgccauc

SEQ ID NO: 3620 - DNA, 17 bp, Artificial Sequence
  Synthetic
ugcacatggggcgccau

SEQ ID NO: 3621 - DNA, 17 bp, Artificial Sequence
  Synthetic
uugcacatggggcgcca

SEQ ID NO: 3622 - DNA, 17 bp, Artificial Sequence
  Synthetic
cuugcacatggggcgcc

SEQ ID NO: 3623 - DNA, 17 bp, Artificial Sequence
  Synthetic
ucuugcacatggggcgc

SEQ ID NO: 3624 - DNA, 17 bp, Artificial Sequence
  Synthetic
cucutgcacatggggcg

SEQ ID NO: 3625 - DNA, 17 bp, Artificial Sequence
  Synthetic
ccucttgcacatggggc

SEQ ID NO: 3626 - DNA, 17 bp, Artificial Sequence
  Synthetic
gccucttgcacatgggg

SEQ ID NO: 3627 - DNA, 17 bp, Artificial Sequence
  Synthetic
agcctcttgcacatggg

SEQ ID NO: 3628 - DNA, 17 bp, Artificial Sequence
  Synthetic
gagcctcttgcacaugg

SEQ ID NO: 3629 - DNA, 17 bp, Artificial Sequence
  Synthetic
ggagcctcttgcacaug

SEQ ID NO: 3630 - DNA, 17 bp, Artificial Sequence
  Synthetic
gggagcctcttgcacau

SEQ ID NO: 3631 - DNA, 17 bp, Artificial Sequence
  Synthetic
ugggagcctcttgcaca

SEQ ID NO: 3632 - DNA, 17 bp, Artificial Sequence
  Synthetic
gugggagcctcttgcac

SEQ ID NO: 3633 - DNA, 17 bp, Artificial Sequence
  Synthetic
ggugggagcctcttgca

SEQ ID NO: 3634 - DNA, 17 bp, Artificial Sequence
  Synthetic
gggugggagcctctugc

SEQ ID NO: 3635 - DNA, 17 bp, Artificial Sequence
  Synthetic
ugggtgggagcctcuug

SEQ ID NO: 3636 - DNA, 17 bp, Artificial Sequence
  Synthetic
augggtgggagcctcuu

SEQ ID NO: 3637 - DNA, 17 bp, Artificial Sequence
  Synthetic
caugggtgggagccucu

SEQ ID NO: 3638 - DNA, 17 bp, Artificial Sequence
  Synthetic
ccaugggtgggagccuc

SEQ ID NO: 3639 - DNA, 17 bp, Artificial Sequence
  Synthetic
gccatgggtgggagccu

SEQ ID NO: 3640 - DNA, 17 bp, Artificial Sequence
  Synthetic
ugccatgggtgggagcc

SEQ ID NO: 3641 - DNA, 17 bp, Artificial Sequence
  Synthetic
cugccatgggtgggagc

SEQ ID NO: 3642 - DNA, 17 bp, Artificial Sequence
  Synthetic
ccugccatgggtgggag

SEQ ID NO: 3643 - DNA, 17 bp, Artificial Sequence
  Synthetic
accugccatgggtggga

SEQ ID NO: 3644 - DNA, 17 bp, Artificial Sequence
  Synthetic
cacctgccatgggtggg

SEQ ID NO: 3645 - DNA, 17 bp, Artificial Sequence
  Synthetic
ccacctgccatgggugg

SEQ ID NO: 3646 - DNA, 17 bp, Artificial Sequence
  Synthetic
gccacctgccatgggug

SEQ ID NO: 3647 - DNA, 17 bp, Artificial Sequence
  Synthetic
ggccacctgccatgggu

SEQ ID NO: 3648 - DNA, 17 bp, Artificial Sequence
  Synthetic
gggccacctgccatggg

SEQ ID NO: 3649 - DNA, 17 bp, Artificial Sequence
  Synthetic
agggccacctgccaugg

SEQ ID NO: 3650 - DNA, 17 bp, Artificial Sequence
  Synthetic
cagggccacctgccaug

SEQ ID NO: 3651 - DNA, 17 bp, Artificial Sequence
  Synthetic
gcagggccacctgccau

SEQ ID NO: 3652 - DNA, 17 bp, Artificial Sequence
  Synthetic
agcagggccacctgcca

SEQ ID NO: 3653 - DNA, 17 bp, Artificial Sequence
  Synthetic
gagcagggccacctgcc

SEQ ID NO: 3654 - RNA, 17 nt, Artificial Sequence
  Synthetic
ugagcagggccaccugc

SEQ ID NO: 3655 - RNA, 17 nt, Artificial Sequence
  Synthetic
cugagcagggccaccug

SEQ ID NO: 3656 - RNA, 17 nt, Artificial Sequence
  Synthetic
acugagcagggccaccu

SEQ ID NO: 3657 - RNA, 17 nt, Artificial Sequence
  Synthetic
cacugagcagggccacc

SEQ ID NO: 3658 - DNA, 17 bp, Artificial Sequence
  Synthetic
ccactgagcagggccac

SEQ ID NO: 3659 - DNA, 17 bp, Artificial Sequence
  Synthetic
gccactgagcagggcca

SEQ ID NO: 3660 - DNA, 17 bp, Artificial Sequence
  Synthetic
ugccactgagcagggcc

SEQ ID NO: 3661 - DNA, 17 bp, Artificial Sequence
  Synthetic
uugccactgagcagggc

SEQ ID NO: 3662 - DNA, 17 bp, Artificial Sequence
  Synthetic
auugccactgagcaggg

SEQ ID NO: 3663 - DNA, 17 bp, Artificial Sequence
  Synthetic
gauugccactgagcagg

SEQ ID NO: 3664 - DNA, 17 bp, Artificial Sequence
  Synthetic
ugautgccactgagcag

SEQ ID NO: 3665 - DNA, 17 bp, Artificial Sequence
  Synthetic
cugattgccactgagca

SEQ ID NO: 3666 - DNA, 17 bp, Artificial Sequence
  Synthetic
gcugattgccactgagc

SEQ ID NO: 3667 - DNA, 17 bp, Artificial Sequence
  Synthetic
agcugattgccactgag

SEQ ID NO: 3668 - DNA, 17 bp, Artificial Sequence
  Synthetic
gagctgattgccacuga

SEQ ID NO: 3669 - DNA, 17 bp, Artificial Sequence
  Synthetic
ggagctgattgccacug

SEQ ID NO: 3670 - DNA, 17 bp, Artificial Sequence
  Synthetic
uggagctgattgccacu

SEQ ID NO: 3671 - DNA, 17 bp, Artificial Sequence
  Synthetic
guggagctgattgccac

SEQ ID NO: 3672 - DNA, 17 bp, Artificial Sequence
  Synthetic
aguggagctgattgcca

SEQ ID NO: 3673 - DNA, 17 bp, Artificial Sequence
  Synthetic
caguggagctgattgcc

SEQ ID NO: 3674 - DNA, 17 bp, Artificial Sequence
  Synthetic
gcagtggagctgatugc

SEQ ID NO: 3675 - DNA, 17 bp, Artificial Sequence
  Synthetic
cgcagtggagctgauug

SEQ ID NO: 3676 - DNA, 17 bp, Artificial Sequence
  Synthetic
ccgcagtggagctgauu

SEQ ID NO: 3677 - DNA, 17 bp, Artificial Sequence
  Synthetic
uccgcagtggagctgau

SEQ ID NO: 3678 - DNA, 17 bp, Artificial Sequence
  Synthetic
cuccgcagtggagcuga

SEQ ID NO: 3679 - DNA, 17 bp, Artificial Sequence
  Synthetic
ccuccgcagtggagcug

SEQ ID NO: 3680 - DNA, 17 bp, Artificial Sequence
  Synthetic
gccuccgcagtggagcu

SEQ ID NO: 3681 - DNA, 17 bp, Artificial Sequence
  Synthetic
cgcctccgcagtggagc

SEQ ID NO: 3682 - DNA, 17 bp, Artificial Sequence
  Synthetic
acgcctccgcagtggag

SEQ ID NO: 3683 - DNA, 17 bp, Artificial Sequence
  Synthetic
gacgcctccgcagtgga

SEQ ID NO: 3684 - DNA, 17 bp, Artificial Sequence
  Synthetic
ggacgcctccgcagugg

SEQ ID NO: 3685 - DNA, 17 bp, Artificial Sequence
  Synthetic
aggacgcctccgcagug

SEQ ID NO: 3686 - DNA, 17 bp, Artificial Sequence
  Synthetic
caggacgcctccgcagu

SEQ ID NO: 3687 - DNA, 17 bp, Artificial Sequence
  Synthetic
ccaggacgcctccgcag

SEQ ID NO: 3688 - DNA, 17 bp, Artificial Sequence
  Synthetic
accaggacgcctccgca

SEQ ID NO: 3689 - DNA, 17 bp, Artificial Sequence
  Synthetic
gaccaggacgcctccgc

SEQ ID NO: 3690 - DNA, 17 bp, Artificial Sequence
  Synthetic
ugaccaggacgcctccg

SEQ ID NO: 3691 - RNA, 17 nt, Artificial Sequence
  Synthetic
uugaccaggacgccucc

SEQ ID NO: 3692 - RNA, 17 nt, Artificial Sequence
  Synthetic
auugaccaggacgccuc

SEQ ID NO: 3693 - RNA, 17 nt, Artificial Sequence
  Synthetic
cauugaccaggacgccu

SEQ ID NO: 3694 - DNA, 17 bp, Artificial Sequence
  Synthetic
ucautgaccaggacgcc

SEQ ID NO: 3695 - DNA, 17 bp, Artificial Sequence
  Synthetic
cucattgaccaggacgc

SEQ ID NO: 3696 - DNA, 17 bp, Artificial Sequence
  Synthetic
gcucattgaccaggacg

SEQ ID NO: 3697 - DNA, 17 bp, Artificial Sequence
  Synthetic
cgcucattgaccaggac

SEQ ID NO: 3698 - DNA, 17 bp, Artificial Sequence
  Synthetic
gcgctcattgaccagga

SEQ ID NO: 3699 - DNA, 17 bp, Artificial Sequence
  Synthetic
agcgctcattgaccagg

SEQ ID NO: 3700 - DNA, 17 bp, Artificial Sequence
  Synthetic
cagcgctcattgaccag

SEQ ID NO: 3701 - DNA, 17 bp, Artificial Sequence
  Synthetic
ccagcgctcattgacca

SEQ ID NO: 3702 - DNA, 17 bp, Artificial Sequence
  Synthetic
cccagcgctcattgacc

SEQ ID NO: 3703 - DNA, 17 bp, Artificial Sequence
  Synthetic
acccagcgctcattgac

SEQ ID NO: 3704 - DNA, 17 bp, Artificial Sequence
  Synthetic
cacccagcgctcatuga

SEQ ID NO: 3705 - DNA, 17 bp, Artificial Sequence
  Synthetic
gcacccagcgctcauug

SEQ ID NO: 3706 - DNA, 17 bp, Artificial Sequence
  Synthetic
agcacccagcgctcauu

SEQ ID NO: 3707 - DNA, 17 bp, Artificial Sequence
  Synthetic
gagcacccagcgctcau

SEQ ID NO: 3708 - RNA, 17 nt, Artificial Sequence
  Synthetic
ugagcacccagcgcuca

SEQ ID NO: 3709 - RNA, 17 nt, Artificial Sequence
  Synthetic
gugagcacccagcgcuc

SEQ ID NO: 3710 - RNA, 17 nt, Artificial Sequence
  Synthetic
agugagcacccagcgcu

SEQ ID NO: 3711 - RNA, 17 nt, Artificial Sequence
  Synthetic
cagugagcacccagcgc

SEQ ID NO: 3712 - DNA, 17 bp, Artificial Sequence
  Synthetic
gcagtgagcacccagcg

SEQ ID NO: 3713 - DNA, 17 bp, Artificial Sequence
  Synthetic
ggcagtgagcacccagc

SEQ ID NO: 3714 - DNA, 17 bp, Artificial Sequence
  Synthetic
cggcagtgagcacccag

SEQ ID NO: 3715 - DNA, 17 bp, Artificial Sequence
  Synthetic
gcggcagtgagcaccca

SEQ ID NO: 3716 - DNA, 17 bp, Artificial Sequence
  Synthetic
ggcggcagtgagcaccc

SEQ ID NO: 3717 - DNA, 17 bp, Artificial Sequence
  Synthetic
gggcggcagtgagcacc

SEQ ID NO: 3718 - DNA, 17 bp, Artificial Sequence
  Synthetic
ugggcggcagtgagcac

SEQ ID NO: 3719 - DNA, 17 bp, Artificial Sequence
  Synthetic
gugggcggcagtgagca

SEQ ID NO: 3720 - DNA, 17 bp, Artificial Sequence
  Synthetic
agugggcggcagtgagc

SEQ ID NO: 3721 - DNA, 17 bp, Artificial Sequence
  Synthetic
cagugggcggcagtgag

SEQ ID NO: 3722 - DNA, 17 bp, Artificial Sequence
  Synthetic
gcagtgggcggcaguga

SEQ ID NO: 3723 - DNA, 17 bp, Artificial Sequence
  Synthetic
ugcagtgggcggcagug

SEQ ID NO: 3724 - DNA, 17 bp, Artificial Sequence
  Synthetic
uugcagtgggcggcagu

SEQ ID NO: 3725 - DNA, 17 bp, Artificial Sequence
  Synthetic
cuugcagtgggcggcag

SEQ ID NO: 3726 - DNA, 17 bp, Artificial Sequence
  Synthetic
ucuugcagtgggcggca

SEQ ID NO: 3727 - DNA, 17 bp, Artificial Sequence
  Synthetic
aucutgcagtgggcggc

SEQ ID NO: 3728 - DNA, 17 bp, Artificial Sequence
  Synthetic
caucttgcagtgggcgg

SEQ ID NO: 3729 - DNA, 17 bp, Artificial Sequence
  Synthetic
ucaucttgcagtgggcg

SEQ ID NO: 3730 - DNA, 17 bp, Artificial Sequence
  Synthetic
uucatcttgcagtgggc

SEQ ID NO: 3731 - DNA, 17 bp, Artificial Sequence
  Synthetic
auucatcttgcagtggg

SEQ ID NO: 3732 - DNA, 17 bp, Artificial Sequence
  Synthetic
cauucatcttgcagugg

SEQ ID NO: 3733 - DNA, 17 bp, Artificial Sequence
  Synthetic
ucautcatcttgcagug

SEQ ID NO: 3734 - DNA, 17 bp, Artificial Sequence
  Synthetic
cucattcatcttgcagu

SEQ ID NO: 3735 - DNA, 17 bp, Artificial Sequence
  Synthetic
acucattcatcttgcag

SEQ ID NO: 3736 - DNA, 17 bp, Artificial Sequence
  Synthetic
uacucattcatcttgca

SEQ ID NO: 3737 - DNA, 17 bp, Artificial Sequence
  Synthetic
guactcattcatctugc

SEQ ID NO: 3738 - DNA, 17 bp, Artificial Sequence
  Synthetic
uguactcattcatcuug

SEQ ID NO: 3739 - DNA, 17 bp, Artificial Sequence
  Synthetic
guguactcattcatcuu

SEQ ID NO: 3740 - DNA, 17 bp, Artificial Sequence
  Synthetic
ggugtactcattcaucu

SEQ ID NO: 3741 - DNA, 17 bp, Artificial Sequence
  Synthetic
cggugtactcattcauc

SEQ ID NO: 3742 - DNA, 17 bp, Artificial Sequence
  Synthetic
acggtgtactcattcau

SEQ ID NO: 3743 - DNA, 17 bp, Artificial Sequence
  Synthetic
cacggtgtactcatuca

SEQ ID NO: 3744 - DNA, 17 bp, Artificial Sequence
  Synthetic
gcacggtgtactcauuc

SEQ ID NO: 3745 - DNA, 17 bp, Artificial Sequence
  Synthetic
ugcacggtgtactcauu

SEQ ID NO: 3746 - DNA, 17 bp, Artificial Sequence
  Synthetic
gugcacggtgtactcau

SEQ ID NO: 3747 - DNA, 17 bp, Artificial Sequence
  Synthetic
ggugcacggtgtacuca

SEQ ID NO: 3748 - DNA, 17 bp, Artificial Sequence
  Synthetic
aggugcacggtgtacuc

SEQ ID NO: 3749 - DNA, 17 bp, Artificial Sequence
  Synthetic
caggtgcacggtgtacu

SEQ ID NO: 3750 - DNA, 17 bp, Artificial Sequence
  Synthetic
ccaggtgcacggtguac

SEQ ID NO: 3751 - DNA, 17 bp, Artificial Sequence
  Synthetic
cccaggtgcacggtgua

SEQ ID NO: 3752 - DNA, 17 bp, Artificial Sequence
  Synthetic
gcccaggtgcacggugu

SEQ ID NO: 3753 - DNA, 17 bp, Artificial Sequence
  Synthetic
ugcccaggtgcacggug

SEQ ID NO: 3754 - DNA, 17 bp, Artificial Sequence
  Synthetic
cugcccaggtgcacggu

SEQ ID NO: 3755 - DNA, 17 bp, Artificial Sequence
  Synthetic
acugcccaggtgcacgg

SEQ ID NO: 3756 - DNA, 17 bp, Artificial Sequence
  Synthetic
cacugcccaggtgcacg

SEQ ID NO: 3757 - DNA, 17 bp, Artificial Sequence
  Synthetic
ucactgcccaggtgcac

SEQ ID NO: 3758 - DNA, 17 bp, Artificial Sequence
  Synthetic
aucactgcccaggtgca

SEQ ID NO: 3759 - DNA, 17 bp, Artificial Sequence
  Synthetic
uaucactgcccaggugc

SEQ ID NO: 3760 - DNA, 17 bp, Artificial Sequence
  Synthetic
guaucactgcccaggug

SEQ ID NO: 3761 - DNA, 17 bp, Artificial Sequence
  Synthetic
cguatcactgcccaggu

SEQ ID NO: 3762 - DNA, 17 bp, Artificial Sequence
  Synthetic
gcguatcactgcccagg

SEQ ID NO: 3763 - DNA, 17 bp, Artificial Sequence
  Synthetic
agcgtatcactgcccag

SEQ ID NO: 3764 - DNA, 17 bp, Artificial Sequence
  Synthetic
cagcgtatcactgccca

SEQ ID NO: 3765 - DNA, 17 bp, Artificial Sequence
  Synthetic
ccagcgtatcactgccc

SEQ ID NO: 3766 - DNA, 17 bp, Artificial Sequence
  Synthetic
cccagcgtatcactgcc

SEQ ID NO: 3767 - DNA, 17 bp, Artificial Sequence
  Synthetic
gcccagcgtatcacugc

SEQ ID NO: 3768 - DNA, 17 bp, Artificial Sequence
  Synthetic
cgcccagcgtatcacug

SEQ ID NO: 3769 - DNA, 17 bp, Artificial Sequence
  Synthetic
ucgcccagcgtatcacu

SEQ ID NO: 3770 - DNA, 17 bp, Artificial Sequence
  Synthetic
gucgcccagcgtatcac

SEQ ID NO: 3771 - DNA, 17 bp, Artificial Sequence
  Synthetic
ugucgcccagcgtauca

SEQ ID NO: 3772 - DNA, 17 bp, Artificial Sequence
  Synthetic
cugucgcccagcgtauc

SEQ ID NO: 3773 - DNA, 17 bp, Artificial Sequence
  Synthetic
ccugtcgcccagcguau

SEQ ID NO: 3774 - DNA, 17 bp, Artificial Sequence
  Synthetic
uccugtcgcccagcgua

SEQ ID NO: 3775 - DNA, 17 bp, Artificial Sequence
  Synthetic
cucctgtcgcccagcgu

SEQ ID NO: 3776 - DNA, 17 bp, Artificial Sequence
  Synthetic
ucucctgtcgcccagcg

SEQ ID NO: 3777 - DNA, 17 bp, Artificial Sequence
  Synthetic
cucucctgtcgcccagc

SEQ ID NO: 3778 - DNA, 17 bp, Artificial Sequence
  Synthetic
gcuctcctgtcgcccag

SEQ ID NO: 3779 - DNA, 17 bp, Artificial Sequence
  Synthetic
agcuctcctgtcgccca

SEQ ID NO: 3780 - DNA, 17 bp, Artificial Sequence
  Synthetic
gagctctcctgtcgccc

SEQ ID NO: 3781 - DNA, 17 bp, Artificial Sequence
  Synthetic
ugagctctcctgtcgcc

SEQ ID NO: 3782 - DNA, 17 bp, Artificial Sequence
  Synthetic
cugagctctcctgtcgc

SEQ ID NO: 3783 - DNA, 17 bp, Artificial Sequence
  Synthetic
ucugagctctcctgucg

SEQ ID NO: 3784 - DNA, 17 bp, Artificial Sequence
  Synthetic
cucugagctctcctguc

SEQ ID NO: 3785 - DNA, 17 bp, Artificial Sequence
  Synthetic
ccuctgagctctccugu

SEQ ID NO: 3786 - DNA, 17 bp, Artificial Sequence
  Synthetic
uccuctgagctctccug

SEQ ID NO: 3787 - DNA, 17 bp, Artificial Sequence
  Synthetic
aucctctgagctctccu

SEQ ID NO: 3788 - DNA, 17 bp, Artificial Sequence
  Synthetic
gaucctctgagctcucc

SEQ ID NO: 3789 - DNA, 17 bp, Artificial Sequence
  Synthetic
ugaucctctgagctcuc

SEQ ID NO: 3790 - DNA, 17 bp, Artificial Sequence
  Synthetic
uugatcctctgagcucu

SEQ ID NO: 3791 - DNA, 17 bp, Artificial Sequence
  Synthetic
cuugatcctctgagcuc

SEQ ID NO: 3792 - DNA, 17 bp, Artificial Sequence
  Synthetic
ccuugatcctctgagcu

SEQ ID NO: 3793 - DNA, 17 bp, Artificial Sequence
  Synthetic
gccutgatcctctgagc

SEQ ID NO: 3794 - DNA, 17 bp, Artificial Sequence
  Synthetic
ggccttgatcctctgag

SEQ ID NO: 3795 - DNA, 17 bp, Artificial Sequence
  Synthetic
aggccttgatcctcuga

SEQ ID NO: 3796 - DNA, 17 bp, Artificial Sequence
  Synthetic
gaggccttgatcctcug

SEQ ID NO: 3797 - DNA, 17 bp, Artificial Sequence
  Synthetic
cgaggccttgatccucu

SEQ ID NO: 3798 - DNA, 17 bp, Artificial Sequence
  Synthetic
ucgaggccttgatccuc

SEQ ID NO: 3799 - DNA, 17 bp, Artificial Sequence
  Synthetic
uucgaggccttgatccu

SEQ ID NO: 3800 - DNA, 17 bp, Artificial Sequence
  Synthetic
cuucgaggccttgaucc

SEQ ID NO: 3801 - DNA, 17 bp, Artificial Sequence
  Synthetic
acuucgaggccttgauc

SEQ ID NO: 3802 - DNA, 17 bp, Artificial Sequence
  Synthetic
gacutcgaggccttgau

SEQ ID NO: 3803 - DNA, 17 bp, Artificial Sequence
  Synthetic
ugacttcgaggcctuga

SEQ ID NO: 3804 - DNA, 17 bp, Artificial Sequence
  Synthetic
augacttcgaggccuug

SEQ ID NO: 3805 - DNA, 17 bp, Artificial Sequence
  Synthetic
aaugacttcgaggccuu

SEQ ID NO: 3806 - DNA, 17 bp, Artificial Sequence
  Synthetic
gaaugacttcgaggccu

SEQ ID NO: 3807 - DNA, 17 bp, Artificial Sequence
  Synthetic
ggaatgacttcgaggcc

SEQ ID NO: 3808 - DNA, 17 bp, Artificial Sequence
  Synthetic
cggaatgacttcgaggc

SEQ ID NO: 3809 - DNA, 17 bp, Artificial Sequence
  Synthetic
gcggaatgacttcgagg

SEQ ID NO: 3810 - DNA, 17 bp, Artificial Sequence
  Synthetic
ggcggaatgacttcgag

SEQ ID NO: 3811 - DNA, 17 bp, Artificial Sequence
  Synthetic
uggcggaatgacttcga

SEQ ID NO: 3812 - DNA, 17 bp, Artificial Sequence
  Synthetic
guggcggaatgactucg

SEQ ID NO: 3813 - DNA, 17 bp, Artificial Sequence
  Synthetic
gguggcggaatgacuuc

SEQ ID NO: 3814 - DNA, 17 bp, Artificial Sequence
  Synthetic
ggguggcggaatgacuu

SEQ ID NO: 3815 - DNA, 17 bp, Artificial Sequence
  Synthetic
ggggtggcggaatgacu

SEQ ID NO: 3816 - DNA, 17 bp, Artificial Sequence
  Synthetic
cggggtggcggaatgac

SEQ ID NO: 3817 - DNA, 17 bp, Artificial Sequence
  Synthetic
ccggggtggcggaauga

SEQ ID NO: 3818 - DNA, 17 bp, Artificial Sequence
  Synthetic
gccggggtggcggaaug

SEQ ID NO: 3819 - DNA, 17 bp, Artificial Sequence
  Synthetic
agccggggtggcggaau

SEQ ID NO: 3820 - DNA, 17 bp, Artificial Sequence
  Synthetic
uagccggggtggcggaa

SEQ ID NO: 3821 - DNA, 17 bp, Artificial Sequence
  Synthetic
guagccggggtggcgga

SEQ ID NO: 3822 - DNA, 17 bp, Artificial Sequence
  Synthetic
aguagccggggtggcgg

SEQ ID NO: 3823 - DNA, 17 bp, Artificial Sequence
  Synthetic
gaguagccggggtggcg

SEQ ID NO: 3824 - DNA, 17 bp, Artificial Sequence
  Synthetic
ggagtagccggggtggc

SEQ ID NO: 3825 - DNA, 17 bp, Artificial Sequence
  Synthetic
uggagtagccggggugg

SEQ ID NO: 3826 - DNA, 17 bp, Artificial Sequence
  Synthetic
guggagtagccggggug

SEQ ID NO: 3827 - DNA, 17 bp, Artificial Sequence
  Synthetic
uguggagtagccggggu

SEQ ID NO: 3828 - DNA, 17 bp, Artificial Sequence
  Synthetic
guguggagtagccgggg

SEQ ID NO: 3829 - DNA, 17 bp, Artificial Sequence
  Synthetic
ugugtggagtagccggg

SEQ ID NO: 3830 - DNA, 17 bp, Artificial Sequence
  Synthetic
cugugtggagtagccgg

SEQ ID NO: 3831 - DNA, 17 bp, Artificial Sequence
  Synthetic
ucugtgtggagtagccg

SEQ ID NO: 3832 - DNA, 17 bp, Artificial Sequence
  Synthetic
gucugtgtggagtagcc

SEQ ID NO: 3833 - DNA, 17 bp, Artificial Sequence
  Synthetic
gguctgtgtggagtagc

SEQ ID NO: 3834 - DNA, 17 bp, Artificial Sequence
  Synthetic
ggguctgtgtggaguag

SEQ ID NO: 3835 - DNA, 17 bp, Artificial Sequence
  Synthetic
ugggtctgtgtggagua

SEQ ID NO: 3836 - DNA, 17 bp, Artificial Sequence
  Synthetic
augggtctgtgtggagu

SEQ ID NO: 3837 - DNA, 17 bp, Artificial Sequence
  Synthetic
caugggtctgtgtggag

SEQ ID NO: 3838 - DNA, 17 bp, Artificial Sequence
  Synthetic
acaugggtctgtgtgga

SEQ ID NO: 3839 - DNA, 17 bp, Artificial Sequence
  Synthetic
aacatgggtctgtgugg

SEQ ID NO: 3840 - DNA, 17 bp, Artificial Sequence
  Synthetic
uaacatgggtctgtgug

SEQ ID NO: 3841 - DNA, 17 bp, Artificial Sequence
  Synthetic
uuaacatgggtctgugu

SEQ ID NO: 3842 - DNA, 17 bp, Artificial Sequence
  Synthetic
auuaacatgggtctgug

SEQ ID NO: 3843 - DNA, 17 bp, Artificial Sequence
  Synthetic
cauuaacatgggtcugu

SEQ ID NO: 3844 - DNA, 17 bp, Artificial Sequence
  Synthetic
ucautaacatgggtcug

SEQ ID NO: 3845 - DNA, 17 bp, Artificial Sequence
  Synthetic
gucattaacatgggucu

SEQ ID NO: 3846 - DNA, 17 bp, Artificial Sequence
  Synthetic
ggucattaacatggguc

SEQ ID NO: 3847 - DNA, 17 bp, Artificial Sequence
  Synthetic
aggucattaacatgggu

SEQ ID NO: 3848 - DNA, 17 bp, Artificial Sequence
  Synthetic
gaggtcattaacatggg

SEQ ID NO: 3849 - DNA, 17 bp, Artificial Sequence
  Synthetic
ugaggtcattaacaugg

SEQ ID NO: 3850 - DNA, 17 bp, Artificial Sequence
  Synthetic
augaggtcattaacaug

SEQ ID NO: 3851 - DNA, 17 bp, Artificial Sequence
  Synthetic
caugaggtcattaacau

SEQ ID NO: 3852 - DNA, 17 bp, Artificial Sequence
  Synthetic
gcaugaggtcattaaca

SEQ ID NO: 3853 - DNA, 17 bp, Artificial Sequence
  Synthetic
agcatgaggtcattaac

SEQ ID NO: 3854 - DNA, 17 bp, Artificial Sequence
  Synthetic
gagcatgaggtcatuaa

SEQ ID NO: 3855 - DNA, 17 bp, Artificial Sequence
  Synthetic
cgagcatgaggtcauua

SEQ ID NO: 3856 - DNA, 17 bp, Artificial Sequence
  Synthetic
acgagcatgaggtcauu

SEQ ID NO: 3857 - DNA, 17 bp, Artificial Sequence
  Synthetic
cacgagcatgaggtcau

SEQ ID NO: 3858 - DNA, 17 bp, Artificial Sequence
  Synthetic
ucacgagcatgagguca

SEQ ID NO: 3859 - DNA, 17 bp, Artificial Sequence
  Synthetic
uucacgagcatgagguc

SEQ ID NO: 3860 - DNA, 17 bp, Artificial Sequence
  Synthetic
cuucacgagcatgaggu

SEQ ID NO: 3861 - DNA, 17 bp, Artificial Sequence
  Synthetic
gcuucacgagcatgagg

SEQ ID NO: 3862 - DNA, 17 bp, Artificial Sequence
  Synthetic
agcutcacgagcatgag

SEQ ID NO: 3863 - DNA, 17 bp, Artificial Sequence
  Synthetic
gagcttcacgagcauga

SEQ ID NO: 3864 - DNA, 17 bp, Artificial Sequence
  Synthetic
ugagcttcacgagcaug

SEQ ID NO: 3865 - DNA, 17 bp, Artificial Sequence
  Synthetic
uugagcttcacgagcau

SEQ ID NO: 3866 - DNA, 17 bp, Artificial Sequence
  Synthetic
auugagcttcacgagca

SEQ ID NO: 3867 - DNA, 17 bp, Artificial Sequence
  Synthetic
uauugagcttcacgagc

SEQ ID NO: 3868 - DNA, 17 bp, Artificial Sequence
  Synthetic
cuautgagcttcacgag

SEQ ID NO: 3869 - DNA, 17 bp, Artificial Sequence
  Synthetic
gcuattgagcttcacga

SEQ ID NO: 3870 - DNA, 17 bp, Artificial Sequence
  Synthetic
ggcuattgagcttcacg

SEQ ID NO: 3871 - DNA, 17 bp, Artificial Sequence
  Synthetic
uggctattgagcttcac

SEQ ID NO: 3872 - DNA, 17 bp, Artificial Sequence
  Synthetic
cuggctattgagctuca

SEQ ID NO: 3873 - DNA, 17 bp, Artificial Sequence
  Synthetic
ccuggctattgagcuuc

SEQ ID NO: 3874 - DNA, 17 bp, Artificial Sequence
  Synthetic
gccuggctattgagcuu

SEQ ID NO: 3875 - DNA, 17 bp, Artificial Sequence
  Synthetic
ggcctggctattgagcu

SEQ ID NO: 3876 - DNA, 17 bp, Artificial Sequence
  Synthetic
uggcctggctattgagc

SEQ ID NO: 3877 - DNA, 17 bp, Artificial Sequence
  Synthetic
cuggcctggctattgag

SEQ ID NO: 3878 - DNA, 17 bp, Artificial Sequence
  Synthetic
ccuggcctggctatuga

SEQ ID NO: 3879 - DNA, 17 bp, Artificial Sequence
  Synthetic
gccuggcctggctauug

SEQ ID NO: 3880 - DNA, 17 bp, Artificial Sequence
  Synthetic
agcctggcctggctauu

SEQ ID NO: 3881 - DNA, 17 bp, Artificial Sequence
  Synthetic
cagcctggcctggcuau

SEQ ID NO: 3882 - DNA, 17 bp, Artificial Sequence
  Synthetic
acagcctggcctggcua

SEQ ID NO: 3883 - DNA, 17 bp, Artificial Sequence
  Synthetic
gacagcctggcctggcu

SEQ ID NO: 3884 - DNA, 17 bp, Artificial Sequence
  Synthetic
ugacagcctggcctggc

SEQ ID NO: 3885 - DNA, 17 bp, Artificial Sequence
  Synthetic
augacagcctggccugg

SEQ ID NO: 3886 - DNA, 17 bp, Artificial Sequence
  Synthetic
gaugacagcctggccug

SEQ ID NO: 3887 - DNA, 17 bp, Artificial Sequence
  Synthetic
ggaugacagcctggccu

SEQ ID NO: 3888 - DNA, 17 bp, Artificial Sequence
  Synthetic
uggatgacagcctggcc

SEQ ID NO: 3889 - DNA, 17 bp, Artificial Sequence
  Synthetic
auggatgacagcctggc

SEQ ID NO: 3890 - DNA, 17 bp, Artificial Sequence
  Synthetic
cauggatgacagccugg

SEQ ID NO: 3891 - DNA, 17 bp, Artificial Sequence
  Synthetic
ccauggatgacagccug

SEQ ID NO: 3892 - DNA, 17 bp, Artificial Sequence
  Synthetic
accatggatgacagccu

SEQ ID NO: 3893 - DNA, 17 bp, Artificial Sequence
  Synthetic
caccatggatgacagcc

SEQ ID NO: 3894 - DNA, 17 bp, Artificial Sequence
  Synthetic
ucaccatggatgacagc

SEQ ID NO: 3895 - DNA, 17 bp, Artificial Sequence
  Synthetic
uucaccatggatgacag

SEQ ID NO: 3896 - DNA, 17 bp, Artificial Sequence
  Synthetic
cuucaccatggatgaca

SEQ ID NO: 3897 - DNA, 17 bp, Artificial Sequence
  Synthetic
ucuucaccatggatgac

SEQ ID NO: 3898 - DNA, 17 bp, Artificial Sequence
  Synthetic
uucutcaccatggauga

SEQ ID NO: 3899 - DNA, 17 bp, Artificial Sequence
  Synthetic
uuucttcaccatggaug

SEQ ID NO: 3900 - DNA, 17 bp, Artificial Sequence
  Synthetic
cuuucttcaccatggau

SEQ ID NO: 3901 - DNA, 17 bp, Artificial Sequence
  Synthetic
acuutcttcaccatgga

SEQ ID NO: 3902 - DNA, 17 bp, Artificial Sequence
  Synthetic
gacuttcttcaccaugg

SEQ ID NO: 3903 - DNA, 17 bp, Artificial Sequence
  Synthetic
ugactttcttcaccaug

SEQ ID NO: 3904 - DNA, 17 bp, Artificial Sequence
  Synthetic
cugactttcttcaccau

SEQ ID NO: 3905 - DNA, 17 bp, Artificial Sequence
  Synthetic
ccugactttcttcacca

SEQ ID NO: 3906 - DNA, 17 bp, Artificial Sequence
  Synthetic
gccugactttcttcacc

SEQ ID NO: 3907 - DNA, 17 bp, Artificial Sequence
  Synthetic
agcctgactttcttcac

SEQ ID NO: 3908 - DNA, 17 bp, Artificial Sequence
  Synthetic
cagcctgactttctuca

SEQ ID NO: 3909 - DNA, 17 bp, Artificial Sequence
  Synthetic
gcagcctgactttcuuc

SEQ ID NO: 3910 - DNA, 17 bp, Artificial Sequence
  Synthetic
ggcagcctgactttcuu

SEQ ID NO: 3911 - DNA, 17 bp, Artificial Sequence
  Synthetic
gggcagcctgacttucu

SEQ ID NO: 3912 - DNA, 17 bp, Artificial Sequence
  Synthetic
agggcagcctgactuuc

SEQ ID NO: 3913 - DNA, 17 bp, Artificial Sequence
  Synthetic
gagggcagcctgacuuu

SEQ ID NO: 3914 - DNA, 17 bp, Artificial Sequence
  Synthetic
ggagggcagcctgacuu

SEQ ID NO: 3915 - DNA, 17 bp, Artificial Sequence
  Synthetic
gggagggcagcctgacu

SEQ ID NO: 3916 - DNA, 17 bp, Artificial Sequence
  Synthetic
cgggagggcagcctgac

SEQ ID NO: 3917 - RNA, 17 nt, Artificial Sequence
  Synthetic
gcgggagggcagccuga

SEQ ID NO: 3918 - RNA, 17 nt, Artificial Sequence
  Synthetic
agcgggagggcagccug

SEQ ID NO: 3919 - RNA, 17 nt, Artificial Sequence
  Synthetic
cagcgggagggcagccu

SEQ ID NO: 3920 - DNA, 17 bp, Artificial Sequence
  Synthetic
gcagcgggagggcagcc

SEQ ID NO: 3921 - DNA, 17 bp, Artificial Sequence
  Synthetic
cgcagcgggagggcagc

SEQ ID NO: 3922 - RNA, 17 nt, Artificial Sequence
  Synthetic
ucgcagcgggagggcag

SEQ ID NO: 3923 - RNA, 17 nt, Artificial Sequence
  Synthetic
uucgcagcgggagggca

SEQ ID NO: 3924 - RNA, 17 nt, Artificial Sequence
  Synthetic
guucgcagcgggagggc

SEQ ID NO: 3925 - RNA, 17 nt, Artificial Sequence
  Synthetic
gguucgcagcgggaggg

SEQ ID NO: 3926 - DNA, 17 bp, Artificial Sequence
  Synthetic
gggutcgcagcgggagg

SEQ ID NO: 3927 - DNA, 17 bp, Artificial Sequence
  Synthetic
ggggttcgcagcgggag

SEQ ID NO: 3928 - DNA, 17 bp, Artificial Sequence
  Synthetic
gggggttcgcagcggga

SEQ ID NO: 3929 - DNA, 17 bp, Artificial Sequence
  Synthetic
agggggttcgcagcggg

SEQ ID NO: 3930 - DNA, 17 bp, Artificial Sequence
  Synthetic
cagggggttcgcagcgg

SEQ ID NO: 3931 - DNA, 17 bp, Artificial Sequence
  Synthetic
ccagggggttcgcagcg

SEQ ID NO: 3932 - DNA, 17 bp, Artificial Sequence
  Synthetic
uccagggggttcgcagc

SEQ ID NO: 3933 - DNA, 17 bp, Artificial Sequence
  Synthetic
uuccagggggttcgcag

SEQ ID NO: 3934 - DNA, 17 bp, Artificial Sequence
  Synthetic
guuccagggggttcgca

SEQ ID NO: 3935 - DNA, 17 bp, Artificial Sequence
  Synthetic
gguuccagggggttcgc

SEQ ID NO: 3936 - DNA, 17 bp, Artificial Sequence
  Synthetic
uggutccagggggtucg

SEQ ID NO: 3937 - DNA, 17 bp, Artificial Sequence
  Synthetic
guggttccaggggguuc

SEQ ID NO: 3938 - DNA, 17 bp, Artificial Sequence
  Synthetic
gguggttccaggggguu

SEQ ID NO: 3939 - DNA, 17 bp, Artificial Sequence
  Synthetic
agguggttccagggggu

SEQ ID NO: 3940 - DNA, 17 bp, Artificial Sequence
  Synthetic
caggtggttccaggggg

SEQ ID NO: 3941 - DNA, 17 bp, Artificial Sequence
  Synthetic
acaggtggttccagggg

SEQ ID NO: 3942 - DNA, 17 bp, Artificial Sequence
  Synthetic
uacaggtggttccaggg

SEQ ID NO: 3943 - DNA, 17 bp, Artificial Sequence
  Synthetic
guacaggtggttccagg

SEQ ID NO: 3944 - DNA, 17 bp, Artificial Sequence
  Synthetic
aguacaggtggttccag

SEQ ID NO: 3945 - DNA, 17 bp, Artificial Sequence
  Synthetic
caguacaggtggttcca

SEQ ID NO: 3946 - DNA, 17 bp, Artificial Sequence
  Synthetic
acagtacaggtggtucc

SEQ ID NO: 3947 - DNA, 17 bp, Artificial Sequence
  Synthetic
gacagtacaggtgguuc

SEQ ID NO: 3948 - DNA, 17 bp, Artificial Sequence
  Synthetic
agacagtacaggtgguu

SEQ ID NO: 3949 - DNA, 17 bp, Artificial Sequence
  Synthetic
gagacagtacaggtggu

SEQ ID NO: 3950 - DNA, 17 bp, Artificial Sequence
  Synthetic
ggagacagtacaggugg

SEQ ID NO: 3951 - DNA, 17 bp, Artificial Sequence
  Synthetic
cggagacagtacaggug

SEQ ID NO: 3952 - DNA, 17 bp, Artificial Sequence
  Synthetic
ccggagacagtacaggu

SEQ ID NO: 3953 - DNA, 17 bp, Artificial Sequence
  Synthetic
gccggagacagtacagg

SEQ ID NO: 3954 - DNA, 17 bp, Artificial Sequence
  Synthetic
agccggagacagtacag

SEQ ID NO: 3955 - DNA, 17 bp, Artificial Sequence
  Synthetic
cagccggagacagtaca

SEQ ID NO: 3956 - RNA, 17 nt, Artificial Sequence
  Synthetic
ccagccggagacaguac

SEQ ID NO: 3957 - RNA, 17 nt, Artificial Sequence
  Synthetic
cccagccggagacagua

SEQ ID NO: 3958 - RNA, 17 nt, Artificial Sequence
  Synthetic
ccccagccggagacagu

SEQ ID NO: 3959 - DNA, 17 bp, Artificial Sequence
  Synthetic
gccccagccggagacag

SEQ ID NO: 3960 - RNA, 17 nt, Artificial Sequence
  Synthetic
ugccccagccggagaca

SEQ ID NO: 3961 - RNA, 17 nt, Artificial Sequence
  Synthetic
gugccccagccggagac

SEQ ID NO: 3962 - RNA, 17 nt, Artificial Sequence
  Synthetic
agugccccagccggaga

SEQ ID NO: 3963 - RNA, 17 nt, Artificial Sequence
  Synthetic
uagugccccagccggag

SEQ ID NO: 3964 - DNA, 17 bp, Artificial Sequence
  Synthetic
guagtgccccagccgga

SEQ ID NO: 3965 - DNA, 17 bp, Artificial Sequence
  Synthetic
gguagtgccccagccgg

SEQ ID NO: 3966 - DNA, 17 bp, Artificial Sequence
  Synthetic
ugguagtgccccagccg

SEQ ID NO: 3967 - DNA, 17 bp, Artificial Sequence
  Synthetic
guggtagtgccccagcc

SEQ ID NO: 3968 - DNA, 17 bp, Artificial Sequence
  Synthetic
cguggtagtgccccagc

SEQ ID NO: 3969 - DNA, 17 bp, Artificial Sequence
  Synthetic
ucguggtagtgccccag

SEQ ID NO: 3970 - DNA, 17 bp, Artificial Sequence
  Synthetic
cucgtggtagtgcccca

SEQ ID NO: 3971 - DNA, 17 bp, Artificial Sequence
  Synthetic
gcucgtggtagtgcccc

SEQ ID NO: 3972 - DNA, 17 bp, Artificial Sequence
  Synthetic
ggcucgtggtagtgccc

SEQ ID NO: 3973 - DNA, 17 bp, Artificial Sequence
  Synthetic
gggctcgtggtagtgcc

SEQ ID NO: 3974 - DNA, 17 bp, Artificial Sequence
  Synthetic
ugggctcgtggtagugc

SEQ ID NO: 3975 - DNA, 17 bp, Artificial Sequence
  Synthetic
cugggctcgtggtagug

SEQ ID NO: 3976 - DNA, 17 bp, Artificial Sequence
  Synthetic
ucugggctcgtggtagu

SEQ ID NO: 3977 - DNA, 17 bp, Artificial Sequence
  Synthetic
aucugggctcgtgguag

SEQ ID NO: 3978 - DNA, 17 bp, Artificial Sequence
  Synthetic
cauctgggctcgtggua

SEQ ID NO: 3979 - DNA, 17 bp, Artificial Sequence
  Synthetic
acauctgggctcgtggu

SEQ ID NO: 3980 - DNA, 17 bp, Artificial Sequence
  Synthetic
cacatctgggctcgugg

SEQ ID NO: 3981 - DNA, 17 bp, Artificial Sequence
  Synthetic
ucacatctgggctcgug

SEQ ID NO: 3982 - DNA, 17 bp, Artificial Sequence
  Synthetic
gucacatctgggctcgu

SEQ ID NO: 3983 - DNA, 17 bp, Artificial Sequence
  Synthetic
ggucacatctgggcucg

SEQ ID NO: 3984 - DNA, 17 bp, Artificial Sequence
  Synthetic
aggucacatctgggcuc

SEQ ID NO: 3985 - DNA, 17 bp, Artificial Sequence
  Synthetic
aaggtcacatctgggcu

SEQ ID NO: 3986 - DNA, 17 bp, Artificial Sequence
  Synthetic
aaaggtcacatctgggc

SEQ ID NO: 3987 - DNA, 17 bp, Artificial Sequence
  Synthetic
gaaaggtcacatctggg

SEQ ID NO: 3988 - DNA, 17 bp, Artificial Sequence
  Synthetic
ggaaaggtcacatcugg

SEQ ID NO: 3989 - DNA, 17 bp, Artificial Sequence
  Synthetic
gggaaaggtcacatcug

SEQ ID NO: 3990 - DNA, 17 bp, Artificial Sequence
  Synthetic
agggaaaggtcacaucu

SEQ ID NO: 3991 - DNA, 17 bp, Artificial Sequence
  Synthetic
gagggaaaggtcacauc

SEQ ID NO: 3992 - DNA, 17 bp, Artificial Sequence
  Synthetic
agagggaaaggtcacau

SEQ ID NO: 3993 - DNA, 17 bp, Artificial Sequence
  Synthetic
cagagggaaaggtcaca

SEQ ID NO: 3994 - DNA, 17 bp, Artificial Sequence
  Synthetic
ucagagggaaaggtcac

SEQ ID NO: 3995 - RNA, 17 nt, Artificial Sequence
  Synthetic
gucagagggaaagguca

SEQ ID NO: 3996 - RNA, 17 nt, Artificial Sequence
  Synthetic
ggucagagggaaagguc

SEQ ID NO: 3997 - RNA, 17 nt, Artificial Sequence
  Synthetic
aggucagagggaaaggu

SEQ ID NO: 3998 - DNA, 17 bp, Artificial Sequence
  Synthetic
gaggtcagagggaaagg

SEQ ID NO: 3999 - DNA, 17 bp, Artificial Sequence
  Synthetic
ugaggtcagagggaaag

SEQ ID NO: 4000 - DNA, 17 bp, Artificial Sequence
  Synthetic
augaggtcagagggaaa

SEQ ID NO: 4001 - DNA, 17 bp, Artificial Sequence
  Synthetic
caugaggtcagagggaa

SEQ ID NO: 4002 - DNA, 17 bp, Artificial Sequence
  Synthetic
acaugaggtcagaggga

SEQ ID NO: 4003 - DNA, 17 bp, Artificial Sequence
  Synthetic
cacatgaggtcagaggg

SEQ ID NO: 4004 - DNA, 17 bp, Artificial Sequence
  Synthetic
gcacatgaggtcagagg

SEQ ID NO: 4005 - DNA, 17 bp, Artificial Sequence
  Synthetic
cgcacatgaggtcagag

SEQ ID NO: 4006 - DNA, 17 bp, Artificial Sequence
  Synthetic
acgcacatgaggtcaga

SEQ ID NO: 4007 - DNA, 17 bp, Artificial Sequence
  Synthetic
cacgcacatgaggtcag

SEQ ID NO: 4008 - DNA, 17 bp, Artificial Sequence
  Synthetic
ccacgcacatgagguca

SEQ ID NO: 4009 - DNA, 17 bp, Artificial Sequence
  Synthetic
uccacgcacatgagguc

SEQ ID NO: 4010 - DNA, 17 bp, Artificial Sequence
  Synthetic
auccacgcacatgaggu

SEQ ID NO: 4011 - DNA, 17 bp, Artificial Sequence
  Synthetic
cauccacgcacatgagg

SEQ ID NO: 4012 - DNA, 17 bp, Artificial Sequence
  Synthetic
acauccacgcacatgag

SEQ ID NO: 4013 - DNA, 17 bp, Artificial Sequence
  Synthetic
gacatccacgcacauga

SEQ ID NO: 4014 - DNA, 17 bp, Artificial Sequence
  Synthetic
ugacatccacgcacaug

SEQ ID NO: 4015 - DNA, 17 bp, Artificial Sequence
  Synthetic
uugacatccacgcacau

SEQ ID NO: 4016 - DNA, 17 bp, Artificial Sequence
  Synthetic
cuugacatccacgcaca

SEQ ID NO: 4017 - DNA, 17 bp, Artificial Sequence
  Synthetic
gcuugacatccacgcac

SEQ ID NO: 4018 - DNA, 17 bp, Artificial Sequence
  Synthetic
agcutgacatccacgca

SEQ ID NO: 4019 - DNA, 17 bp, Artificial Sequence
  Synthetic
gagcttgacatccacgc

SEQ ID NO: 4020 - DNA, 17 bp, Artificial Sequence
  Synthetic
ugagcttgacatccacg

SEQ ID NO: 4021 - DNA, 17 bp, Artificial Sequence
  Synthetic
augagcttgacatccac

SEQ ID NO: 4022 - DNA, 17 bp, Artificial Sequence
  Synthetic
gaugagcttgacatcca

SEQ ID NO: 4023 - DNA, 17 bp, Artificial Sequence
  Synthetic
agaugagcttgacaucc

SEQ ID NO: 4024 - DNA, 17 bp, Artificial Sequence
  Synthetic
gagatgagcttgacauc

SEQ ID NO: 4025 - DNA, 17 bp, Artificial Sequence
  Synthetic
ggagatgagcttgacau

SEQ ID NO: 4026 - DNA, 17 bp, Artificial Sequence
  Synthetic
gggagatgagcttgaca

SEQ ID NO: 4027 - DNA, 17 bp, Artificial Sequence
  Synthetic
ggggagatgagcttgac

SEQ ID NO: 4028 - DNA, 17 bp, Artificial Sequence
  Synthetic
gggggagatgagctuga

SEQ ID NO: 4029 - DNA, 17 bp, Artificial Sequence
  Synthetic
ggggggagatgagcuug

SEQ ID NO: 4030 - DNA, 17 bp, Artificial Sequence
  Synthetic
uggggggagatgagcuu

SEQ ID NO: 4031 - DNA, 17 bp, Artificial Sequence
  Synthetic
cuggggggagatgagcu

SEQ ID NO: 4032 - DNA, 17 bp, Artificial Sequence
  Synthetic
ccuggggggagatgagc

SEQ ID NO: 4033 - DNA, 17 bp, Artificial Sequence
  Synthetic
uccuggggggagatgag

SEQ ID NO: 4034 - DNA, 17 bp, Artificial Sequence
  Synthetic
gucctggggggagauga

SEQ ID NO: 4035 - DNA, 17 bp, Artificial Sequence
  Synthetic
agucctggggggagaug

SEQ ID NO: 4036 - DNA, 17 bp, Artificial Sequence
  Synthetic
cagucctggggggagau

SEQ ID NO: 4037 - DNA, 17 bp, Artificial Sequence
  Synthetic
gcagtcctggggggaga

SEQ ID NO: 4038 - DNA, 17 bp, Artificial Sequence
  Synthetic
ugcagtcctggggggag

SEQ ID NO: 4039 - DNA, 17 bp, Artificial Sequence
  Synthetic
gugcagtcctgggggga

SEQ ID NO: 4040 - DNA, 17 bp, Artificial Sequence
  Synthetic
cgugcagtcctgggggg

SEQ ID NO: 4041 - DNA, 17 bp, Artificial Sequence
  Synthetic
ucgugcagtcctggggg

SEQ ID NO: 4042 - DNA, 17 bp, Artificial Sequence
  Synthetic
uucgtgcagtcctgggg

SEQ ID NO: 4043 - DNA, 17 bp, Artificial Sequence
  Synthetic
cuucgtgcagtcctggg

SEQ ID NO: 4044 - DNA, 17 bp, Artificial Sequence
  Synthetic
ccuucgtgcagtccugg

SEQ ID NO: 4045 - DNA, 17 bp, Artificial Sequence
  Synthetic
accutcgtgcagtccug

SEQ ID NO: 4046 - DNA, 17 bp, Artificial Sequence
  Synthetic
aaccttcgtgcagtccu

SEQ ID NO: 4047 - DNA, 17 bp, Artificial Sequence
  Synthetic
aaaccttcgtgcagucc

SEQ ID NO: 4048 - DNA, 17 bp, Artificial Sequence
  Synthetic
uaaaccttcgtgcaguc

SEQ ID NO: 4049 - DNA, 17 bp, Artificial Sequence
  Synthetic
guaaaccttcgtgcagu

SEQ ID NO: 4050 - DNA, 17 bp, Artificial Sequence
  Synthetic
uguaaaccttcgtgcag

SEQ ID NO: 4051 - DNA, 17 bp, Artificial Sequence
  Synthetic
uuguaaaccttcgtgca

SEQ ID NO: 4052 - DNA, 17 bp, Artificial Sequence
  Synthetic
cuugtaaaccttcgugc

SEQ ID NO: 4053 - DNA, 17 bp, Artificial Sequence
  Synthetic
ccuugtaaaccttcgug

SEQ ID NO: 4054 - DNA, 17 bp, Artificial Sequence
  Synthetic
uccutgtaaaccttcgu

SEQ ID NO: 4055 - DNA, 17 bp, Artificial Sequence
  Synthetic
guccttgtaaacctucg

SEQ ID NO: 4056 - DNA, 17 bp, Artificial Sequence
  Synthetic
aguccttgtaaaccuuc

SEQ ID NO: 4057 - DNA, 17 bp, Artificial Sequence
  Synthetic
aaguccttgtaaaccuu

SEQ ID NO: 4058 - DNA, 17 bp, Artificial Sequence
  Synthetic
uaagtccttgtaaaccu

SEQ ID NO: 4059 - DNA, 17 bp, Artificial Sequence
  Synthetic
guaagtccttgtaaacc

SEQ ID NO: 4060 - DNA, 17 bp, Artificial Sequence
  Synthetic
aguaagtccttgtaaac

SEQ ID NO: 4061 - DNA, 17 bp, Artificial Sequence
  Synthetic
caguaagtccttgtaaa

SEQ ID NO: 4062 - DNA, 17 bp, Artificial Sequence
  Synthetic
ccagtaagtccttguaa

SEQ ID NO: 4063 - DNA, 17 bp, Artificial Sequence
  Synthetic
uccagtaagtccttgua

SEQ ID NO: 4064 - DNA, 17 bp, Artificial Sequence
  Synthetic
uuccagtaagtcctugu

SEQ ID NO: 4065 - DNA, 17 bp, Artificial Sequence
  Synthetic
uuuccagtaagtccuug

SEQ ID NO: 4066 - DNA, 17 bp, Artificial Sequence
  Synthetic
uuuuccagtaagtccuu

SEQ ID NO: 4067 - DNA, 17 bp, Artificial Sequence
  Synthetic
auuutccagtaagtccu

SEQ ID NO: 4068 - DNA, 17 bp, Artificial Sequence
  Synthetic
aauuttccagtaagucc

SEQ ID NO: 4069 - DNA, 17 bp, Artificial Sequence
  Synthetic
gaautttccagtaaguc

SEQ ID NO: 4070 - DNA, 17 bp, Artificial Sequence
  Synthetic
ggaattttccagtaagu

SEQ ID NO: 4071 - DNA, 17 bp, Artificial Sequence
  Synthetic
uggaattttccagtaag

SEQ ID NO: 4072 - DNA, 17 bp, Artificial Sequence
  Synthetic
auggaattttccaguaa

SEQ ID NO: 4073 - DNA, 17 bp, Artificial Sequence
  Synthetic
cauggaattttccagua

SEQ ID NO: 4074 - DNA, 17 bp, Artificial Sequence
  Synthetic
gcauggaattttccagu

SEQ ID NO: 4075 - DNA, 17 bp, Artificial Sequence
  Synthetic
agcatggaattttccag

SEQ ID NO: 4076 - DNA, 17 bp, Artificial Sequence
  Synthetic
cagcatggaattttcca

SEQ ID NO: 4077 - DNA, 17 bp, Artificial Sequence
  Synthetic
acagcatggaatttucc

SEQ ID NO: 4078 - DNA, 17 bp, Artificial Sequence
  Synthetic
cacagcatggaattuuc

SEQ ID NO: 4079 - DNA, 17 bp, Artificial Sequence
  Synthetic
gcacagcatggaatuuu

SEQ ID NO: 4080 - DNA, 17 bp, Artificial Sequence
  Synthetic
cgcacagcatggaauuu

SEQ ID NO: 4081 - DNA, 17 bp, Artificial Sequence
  Synthetic
gcgcacagcatggaauu

SEQ ID NO: 4082 - DNA, 17 bp, Artificial Sequence
  Synthetic
agcgcacagcatggaau

SEQ ID NO: 4083 - DNA, 17 bp, Artificial Sequence
  Synthetic
cagcgcacagcatggaa

SEQ ID NO: 4084 - DNA, 17 bp, Artificial Sequence
  Synthetic
ccagcgcacagcatgga

SEQ ID NO: 4085 - RNA, 17 nt, Artificial Sequence
  Synthetic
gccagcgcacagcaugg

SEQ ID NO: 4086 - RNA, 17 nt, Artificial Sequence
  Synthetic
ugccagcgcacagcaug

SEQ ID NO: 4087 - RNA, 17 nt, Artificial Sequence
  Synthetic
augccagcgcacagcau

SEQ ID NO: 4088 - RNA, 17 nt, Artificial Sequence
  Synthetic
gaugccagcgcacagca

SEQ ID NO: 4089 - RNA, 17 nt, Artificial Sequence
  Synthetic
ggaugccagcgcacagc

SEQ ID NO: 4090 - DNA, 17 bp, Artificial Sequence
  Synthetic
gggatgccagcgcacag

SEQ ID NO: 4091 - DNA, 17 bp, Artificial Sequence
  Synthetic
ggggatgccagcgcaca

SEQ ID NO: 4092 - DNA, 17 bp, Artificial Sequence
  Synthetic
cggggatgccagcgcac

SEQ ID NO: 4093 - DNA, 17 bp, Artificial Sequence
  Synthetic
ucggggatgccagcgca

SEQ ID NO: 4094 - DNA, 17 bp, Artificial Sequence
  Synthetic
gucggggatgccagcgc

SEQ ID NO: 4095 - DNA, 17 bp, Artificial Sequence
  Synthetic
agucggggatgccagcg

SEQ ID NO: 4096 - DNA, 17 bp, Artificial Sequence
  Synthetic
gagucggggatgccagc

SEQ ID NO: 4097 - DNA, 17 bp, Artificial Sequence
  Synthetic
ggagtcggggatgccag

SEQ ID NO: 4098 - DNA, 17 bp, Artificial Sequence
  Synthetic
uggagtcggggatgcca

SEQ ID NO: 4099 - DNA, 17 bp, Artificial Sequence
  Synthetic
uuggagtcggggatgcc

SEQ ID NO: 4100 - DNA, 17 bp, Artificial Sequence
  Synthetic
cuuggagtcggggaugc

SEQ ID NO: 4101 - DNA, 17 bp, Artificial Sequence
  Synthetic
ucuuggagtcggggaug

SEQ ID NO: 4102 - DNA, 17 bp, Artificial Sequence
  Synthetic
uucutggagtcggggau

SEQ ID NO: 4103 - DNA, 17 bp, Artificial Sequence
  Synthetic
uuucttggagtcgggga

SEQ ID NO: 4104 - DNA, 17 bp, Artificial Sequence
  Synthetic
uuuucttggagtcgggg

SEQ ID NO: 4105 - DNA, 17 bp, Artificial Sequence
  Synthetic
uuuutcttggagtcggg

SEQ ID NO: 4106 - DNA, 17 bp, Artificial Sequence
  Synthetic
guuuttcttggagtcgg

SEQ ID NO: 4107 - DNA, 17 bp, Artificial Sequence
  Synthetic
cguutttcttggagucg

SEQ ID NO: 4108 - DNA, 17 bp, Artificial Sequence
  Synthetic
gcguttttcttggaguc

SEQ ID NO: 4109 - DNA, 17 bp, Artificial Sequence
  Synthetic
ggcgtttttcttggagu

SEQ ID NO: 4110 - DNA, 17 bp, Artificial Sequence
  Synthetic
aggcgtttttcttggag

SEQ ID NO: 4111 - DNA, 17 bp, Artificial Sequence
  Synthetic
caggcgtttttcttgga

SEQ ID NO: 4112 - DNA, 17 bp, Artificial Sequence
  Synthetic
gcaggcgtttttctugg

SEQ ID NO: 4113 - DNA, 17 bp, Artificial Sequence
  Synthetic
ugcaggcgtttttcuug

SEQ ID NO: 4114 - DNA, 17 bp, Artificial Sequence
  Synthetic
uugcaggcgtttttcuu

SEQ ID NO: 4115 - DNA, 17 bp, Artificial Sequence
  Synthetic
auugcaggcgttttucu

SEQ ID NO: 4116 - DNA, 17 bp, Artificial Sequence
  Synthetic
cauugcaggcgtttuuc

SEQ ID NO: 4117 - DNA, 17 bp, Artificial Sequence
  Synthetic
ccautgcaggcgttuuu

SEQ ID NO: 4118 - DNA, 17 bp, Artificial Sequence
  Synthetic
accattgcaggcgtuuu

SEQ ID NO: 4119 - DNA, 17 bp, Artificial Sequence
  Synthetic
caccattgcaggcguuu

SEQ ID NO: 4120 - DNA, 17 bp, Artificial Sequence
  Synthetic
ucaccattgcaggcguu

SEQ ID NO: 4121 - DNA, 17 bp, Artificial Sequence
  Synthetic
gucaccattgcaggcgu

SEQ ID NO: 4122 - DNA, 17 bp, Artificial Sequence
  Synthetic
agucaccattgcaggcg

SEQ ID NO: 4123 - DNA, 17 bp, Artificial Sequence
  Synthetic
gagucaccattgcaggc

SEQ ID NO: 4124 - DNA, 17 bp, Artificial Sequence
  Synthetic
ugagtcaccattgcagg

SEQ ID NO: 4125 - DNA, 17 bp, Artificial Sequence
  Synthetic
cugagtcaccattgcag

SEQ ID NO: 4126 - DNA, 17 bp, Artificial Sequence
  Synthetic
ccugagtcaccattgca

SEQ ID NO: 4127 - DNA, 17 bp, Artificial Sequence
  Synthetic
cccugagtcaccatugc

SEQ ID NO: 4128 - DNA, 17 bp, Artificial Sequence
  Synthetic
cccctgagtcaccauug

SEQ ID NO: 4129 - DNA, 17 bp, Artificial Sequence
  Synthetic
ccccctgagtcaccauu

SEQ ID NO: 4130 - DNA, 17 bp, Artificial Sequence
  Synthetic
uccccctgagtcaccau

SEQ ID NO: 4131 - DNA, 17 bp, Artificial Sequence
  Synthetic
guccccctgagtcacca

SEQ ID NO: 4132 - DNA, 17 bp, Artificial Sequence
  Synthetic
gguccccctgagtcacc

SEQ ID NO: 4133 - DNA, 17 bp, Artificial Sequence
  Synthetic
cgguccccctgagtcac

SEQ ID NO: 4134 - DNA, 17 bp, Artificial Sequence
  Synthetic
acggtccccctgaguca

SEQ ID NO: 4135 - DNA, 17 bp, Artificial Sequence
  Synthetic
aacggtccccctgaguc

SEQ ID NO: 4136 - DNA, 17 bp, Artificial Sequence
  Synthetic
caacggtccccctgagu

SEQ ID NO: 4137 - DNA, 17 bp, Artificial Sequence
  Synthetic
ccaacggtccccctgag

SEQ ID NO: 4138 - DNA, 17 bp, Artificial Sequence
  Synthetic
accaacggtcccccuga

SEQ ID NO: 4139 - DNA, 17 bp, Artificial Sequence
  Synthetic
caccaacggtcccccug

SEQ ID NO: 4140 - DNA, 17 bp, Artificial Sequence
  Synthetic
acaccaacggtcccccu

SEQ ID NO: 4141 - DNA, 17 bp, Artificial Sequence
  Synthetic
cacaccaacggtccccc

SEQ ID NO: 4142 - DNA, 17 bp, Artificial Sequence
  Synthetic
gcacaccaacggtcccc

SEQ ID NO: 4143 - DNA, 17 bp, Artificial Sequence
  Synthetic
ugcacaccaacggtccc

SEQ ID NO: 4144 - RNA, 17 nt, Artificial Sequence
  Synthetic
cugcacaccaacggucc

SEQ ID NO: 4145 - RNA, 17 nt, Artificial Sequence
  Synthetic
ucugcacaccaacgguc

SEQ ID NO: 4146 - RNA, 17 nt, Artificial Sequence
  Synthetic
cucugcacaccaacggu

SEQ ID NO: 4147 - DNA, 17 bp, Artificial Sequence
  Synthetic
ccuctgcacaccaacgg

SEQ ID NO: 4148 - DNA, 17 bp, Artificial Sequence
  Synthetic
accuctgcacaccaacg

SEQ ID NO: 4149 - DNA, 17 bp, Artificial Sequence
  Synthetic
uacctctgcacaccaac

SEQ ID NO: 4150 - DNA, 17 bp, Artificial Sequence
  Synthetic
guacctctgcacaccaa

SEQ ID NO: 4151 - DNA, 17 bp, Artificial Sequence
  Synthetic
gguacctctgcacacca

SEQ ID NO: 4152 - DNA, 17 bp, Artificial Sequence
  Synthetic
ggguacctctgcacacc

SEQ ID NO: 4153 - DNA, 17 bp, Artificial Sequence
  Synthetic
agggtacctctgcacac

SEQ ID NO: 4154 - DNA, 17 bp, Artificial Sequence
  Synthetic
cagggtacctctgcaca

SEQ ID NO: 4155 - DNA, 17 bp, Artificial Sequence
  Synthetic
gcagggtacctctgcac

SEQ ID NO: 4156 - DNA, 17 bp, Artificial Sequence
  Synthetic
ugcagggtacctctgca

SEQ ID NO: 4157 - DNA, 17 bp, Artificial Sequence
  Synthetic
uugcagggtacctcugc

SEQ ID NO: 4158 - DNA, 17 bp, Artificial Sequence
  Synthetic
cuugcagggtacctcug

SEQ ID NO: 4159 - DNA, 17 bp, Artificial Sequence
  Synthetic
ccuugcagggtaccucu

SEQ ID NO: 4160 - DNA, 17 bp, Artificial Sequence
  Synthetic
accutgcagggtaccuc

SEQ ID NO: 4161 - DNA, 17 bp, Artificial Sequence
  Synthetic
gaccttgcagggtaccu

SEQ ID NO: 4162 - DNA, 17 bp, Artificial Sequence
  Synthetic
agaccttgcagggtacc

SEQ ID NO: 4163 - DNA, 17 bp, Artificial Sequence
  Synthetic
cagaccttgcaggguac

SEQ ID NO: 4164 - DNA, 17 bp, Artificial Sequence
  Synthetic
ccagaccttgcagggua

SEQ ID NO: 4165 - DNA, 17 bp, Artificial Sequence
  Synthetic
accagaccttgcagggu

SEQ ID NO: 4166 - DNA, 17 bp, Artificial Sequence
  Synthetic
caccagaccttgcaggg

SEQ ID NO: 4167 - DNA, 17 bp, Artificial Sequence
  Synthetic
acaccagaccttgcagg

SEQ ID NO: 4168 - DNA, 17 bp, Artificial Sequence
  Synthetic
gacaccagaccttgcag

SEQ ID NO: 4169 - DNA, 17 bp, Artificial Sequence
  Synthetic
ggacaccagaccttgca

SEQ ID NO: 4170 - DNA, 17 bp, Artificial Sequence
  Synthetic
aggacaccagacctugc

SEQ ID NO: 4171 - RNA, 17 nt, Artificial Sequence
  Synthetic
caggacaccagaccuug

SEQ ID NO: 4172 - RNA, 17 nt, Artificial Sequence
  Synthetic
ccaggacaccagaccuu

SEQ ID NO: 4173 - RNA, 17 nt, Artificial Sequence
  Synthetic
cccaggacaccagaccu

SEQ ID NO: 4174 - DNA, 17 bp, Artificial Sequence
  Synthetic
ccccaggacaccagacc

SEQ ID NO: 4175 - RNA, 17 nt, Artificial Sequence
  Synthetic
uccccaggacaccagac

SEQ ID NO: 4176 - RNA, 17 nt, Artificial Sequence
  Synthetic
uuccccaggacaccaga

SEQ ID NO: 4177 - RNA, 17 nt, Artificial Sequence
  Synthetic
guuccccaggacaccag

SEQ ID NO: 4178 - RNA, 17 nt, Artificial Sequence
  Synthetic
aguuccccaggacacca

SEQ ID NO: 4179 - DNA, 17 bp, Artificial Sequence
  Synthetic
aagutccccaggacacc

SEQ ID NO: 4180 - DNA, 17 bp, Artificial Sequence
  Synthetic
aaagttccccaggacac

SEQ ID NO: 4181 - DNA, 17 bp, Artificial Sequence
  Synthetic
gaaagttccccaggaca

SEQ ID NO: 4182 - DNA, 17 bp, Artificial Sequence
  Synthetic
ggaaagttccccaggac

SEQ ID NO: 4183 - DNA, 17 bp, Artificial Sequence
  Synthetic
gggaaagttccccagga

SEQ ID NO: 4184 - DNA, 17 bp, Artificial Sequence
  Synthetic
agggaaagttccccagg

SEQ ID NO: 4185 - DNA, 17 bp, Artificial Sequence
  Synthetic
aagggaaagttccccag

SEQ ID NO: 4186 - DNA, 17 bp, Artificial Sequence
  Synthetic
caagggaaagttcccca

SEQ ID NO: 4187 - DNA, 17 bp, Artificial Sequence
  Synthetic
gcaagggaaagttcccc

SEQ ID NO: 4188 - DNA, 17 bp, Artificial Sequence
  Synthetic
cgcaagggaaagttccc

SEQ ID NO: 4189 - DNA, 17 bp, Artificial Sequence
  Synthetic
ccgcaagggaaagtucc

SEQ ID NO: 4190 - RNA, 17 nt, Artificial Sequence
  Synthetic
gccgcaagggaaaguuc

SEQ ID NO: 4191 - RNA, 17 nt, Artificial Sequence
  Synthetic
ggccgcaagggaaaguu

SEQ ID NO: 4192 - RNA, 17 nt, Artificial Sequence
  Synthetic
uggccgcaagggaaagu

SEQ ID NO: 4193 - RNA, 17 nt, Artificial Sequence
  Synthetic
uuggccgcaagggaaag

SEQ ID NO: 4194 - RNA, 17 nt, Artificial Sequence
  Synthetic
guuggccgcaagggaaa

SEQ ID NO: 4195 - RNA, 17 nt, Artificial Sequence
  Synthetic
gguuggccgcaagggaa

SEQ ID NO: 4196 - DNA, 17 bp, Artificial Sequence
  Synthetic
gggutggccgcaaggga

SEQ ID NO: 4197 - DNA, 17 bp, Artificial Sequence
  Synthetic
ugggttggccgcaaggg

SEQ ID NO: 4198 - DNA, 17 bp, Artificial Sequence
  Synthetic
uugggttggccgcaagg

SEQ ID NO: 4199 - DNA, 17 bp, Artificial Sequence
  Synthetic
auugggttggccgcaag

SEQ ID NO: 4200 - DNA, 17 bp, Artificial Sequence
  Synthetic
cauugggttggccgcaa

SEQ ID NO: 4201 - DNA, 17 bp, Artificial Sequence
  Synthetic
ucautgggttggccgca

SEQ ID NO: 4202 - DNA, 17 bp, Artificial Sequence
  Synthetic
gucattgggttggccgc

SEQ ID NO: 4203 - DNA, 17 bp, Artificial Sequence
  Synthetic
ggucattgggttggccg

SEQ ID NO: 4204 - DNA, 17 bp, Artificial Sequence
  Synthetic
gggucattgggttggcc

SEQ ID NO: 4205 - DNA, 17 bp, Artificial Sequence
  Synthetic
ugggtcattgggttggc

SEQ ID NO: 4206 - DNA, 17 bp, Artificial Sequence
  Synthetic
cugggtcattgggtugg

SEQ ID NO: 4207 - DNA, 17 bp, Artificial Sequence
  Synthetic
ccugggtcattggguug

SEQ ID NO: 4208 - DNA, 17 bp, Artificial Sequence
  Synthetic
uccugggtcattggguu

SEQ ID NO: 4209 - DNA, 17 bp, Artificial Sequence
  Synthetic
cucctgggtcattgggu

SEQ ID NO: 4210 - DNA, 17 bp, Artificial Sequence
  Synthetic
acucctgggtcattggg

SEQ ID NO: 4211 - DNA, 17 bp, Artificial Sequence
  Synthetic
gacucctgggtcatugg

SEQ ID NO: 4212 - DNA, 17 bp, Artificial Sequence
  Synthetic
agactcctgggtcauug

SEQ ID NO: 4213 - DNA, 17 bp, Artificial Sequence
  Synthetic
uagactcctgggtcauu

SEQ ID NO: 4214 - DNA, 17 bp, Artificial Sequence
  Synthetic
guagactcctgggtcau

SEQ ID NO: 4215 - DNA, 17 bp, Artificial Sequence
  Synthetic
uguagactcctggguca

SEQ ID NO: 4216 - DNA, 17 bp, Artificial Sequence
  Synthetic
guguagactcctggguc

SEQ ID NO: 4217 - DNA, 17 bp, Artificial Sequence
  Synthetic
agugtagactcctgggu

SEQ ID NO: 4218 - DNA, 17 bp, Artificial Sequence
  Synthetic
gagugtagactcctggg

SEQ ID NO: 4219 - DNA, 17 bp, Artificial Sequence
  Synthetic
ugagtgtagactccugg

SEQ ID NO: 4220 - DNA, 17 bp, Artificial Sequence
  Synthetic
uugagtgtagactccug

SEQ ID NO: 4221 - DNA, 17 bp, Artificial Sequence
  Synthetic
cuugagtgtagactccu

SEQ ID NO: 4222 - DNA, 17 bp, Artificial Sequence
  Synthetic
acuugagtgtagacucc

SEQ ID NO: 4223 - DNA, 17 bp, Artificial Sequence
  Synthetic
cacutgagtgtagacuc

SEQ ID NO: 4224 - DNA, 17 bp, Artificial Sequence
  Synthetic
acacttgagtgtagacu

SEQ ID NO: 4225 - DNA, 17 bp, Artificial Sequence
  Synthetic
cacacttgagtgtagac

SEQ ID NO: 4226 - DNA, 17 bp, Artificial Sequence
  Synthetic
gcacacttgagtgtaga

SEQ ID NO: 4227 - DNA, 17 bp, Artificial Sequence
  Synthetic
ugcacacttgagtguag

SEQ ID NO: 4228 - DNA, 17 bp, Artificial Sequence
  Synthetic
uugcacacttgagtgua

SEQ ID NO: 4229 - DNA, 17 bp, Artificial Sequence
  Synthetic
cuugcacacttgagugu

SEQ ID NO: 4230 - DNA, 17 bp, Artificial Sequence
  Synthetic
acuugcacacttgagug

SEQ ID NO: 4231 - DNA, 17 bp, Artificial Sequence
  Synthetic
aacutgcacacttgagu

SEQ ID NO: 4232 - DNA, 17 bp, Artificial Sequence
  Synthetic
gaacttgcacacttgag

SEQ ID NO: 4233 - DNA, 17 bp, Artificial Sequence
  Synthetic
ugaacttgcacactuga

SEQ ID NO: 4234 - DNA, 17 bp, Artificial Sequence
  Synthetic
gugaacttgcacacuug

SEQ ID NO: 4235 - DNA, 17 bp, Artificial Sequence
  Synthetic
ggugaacttgcacacuu

SEQ ID NO: 4236 - DNA, 17 bp, Artificial Sequence
  Synthetic
uggugaacttgcacacu

SEQ ID NO: 4237 - DNA, 17 bp, Artificial Sequence
  Synthetic
uuggtgaacttgcacac

SEQ ID NO: 4238 - DNA, 17 bp, Artificial Sequence
  Synthetic
cuuggtgaacttgcaca

SEQ ID NO: 4239 - DNA, 17 bp, Artificial Sequence
  Synthetic
acuuggtgaacttgcac

SEQ ID NO: 4240 - DNA, 17 bp, Artificial Sequence
  Synthetic
cacutggtgaacttgca

SEQ ID NO: 4241 - DNA, 17 bp, Artificial Sequence
  Synthetic
ccacttggtgaactugc

SEQ ID NO: 4242 - DNA, 17 bp, Artificial Sequence
  Synthetic
uccacttggtgaacuug

SEQ ID NO: 4243 - DNA, 17 bp, Artificial Sequence
  Synthetic
auccacttggtgaacuu

SEQ ID NO: 4244 - DNA, 17 bp, Artificial Sequence
  Synthetic
uauccacttggtgaacu

SEQ ID NO: 4245 - DNA, 17 bp, Artificial Sequence
  Synthetic
uuauccacttggtgaac

SEQ ID NO: 4246 - DNA, 17 bp, Artificial Sequence
  Synthetic
uuuatccacttggtgaa

SEQ ID NO: 4247 - DNA, 17 bp, Artificial Sequence
  Synthetic
auuuatccacttgguga

SEQ ID NO: 4248 - DNA, 17 bp, Artificial Sequence
  Synthetic
cauutatccacttggug

SEQ ID NO: 4249 - DNA, 17 bp, Artificial Sequence
  Synthetic
ucauttatccacttggu

SEQ ID NO: 4250 - DNA, 17 bp, Artificial Sequence
  Synthetic
gucatttatccactugg

SEQ ID NO: 4251 - DNA, 17 bp, Artificial Sequence
  Synthetic
ugucatttatccacuug

SEQ ID NO: 4252 - DNA, 17 bp, Artificial Sequence
  Synthetic
gugucatttatccacuu

SEQ ID NO: 4253 - DNA, 17 bp, Artificial Sequence
  Synthetic
ggugtcatttatccacu

SEQ ID NO: 4254 - DNA, 17 bp, Artificial Sequence
  Synthetic
uggugtcatttatccac

SEQ ID NO: 4255 - DNA, 17 bp, Artificial Sequence
  Synthetic
auggtgtcatttatcca

SEQ ID NO: 4256 - DNA, 17 bp, Artificial Sequence
  Synthetic
cauggtgtcatttaucc

SEQ ID NO: 4257 - DNA, 17 bp, Artificial Sequence
  Synthetic
ucauggtgtcatttauc

SEQ ID NO: 4258 - DNA, 17 bp, Artificial Sequence
  Synthetic
uucatggtgtcattuau

SEQ ID NO: 4259 - DNA, 17 bp, Artificial Sequence
  Synthetic
uuucatggtgtcatuua

SEQ ID NO: 4260 - DNA, 17 bp, Artificial Sequence
  Synthetic
uuuucatggtgtcauuu

SEQ ID NO: 4261 - DNA, 17 bp, Artificial Sequence
  Synthetic
uuuutcatggtgtcauu

SEQ ID NO: 4262 - DNA, 17 bp, Artificial Sequence
  Synthetic
cuuuttcatggtgtcau

SEQ ID NO: 4263 - DNA, 17 bp, Artificial Sequence
  Synthetic
gcuutttcatggtguca

SEQ ID NO: 4264 - DNA, 17 bp, Artificial Sequence
  Synthetic
ugcuttttcatggtguc

SEQ ID NO: 4265 - DNA, 17 bp, Artificial Sequence
  Synthetic
augctttttcatggugu

SEQ ID NO: 4266 - DNA, 17 bp, Artificial Sequence
  Synthetic
gaugctttttcatggug

SEQ ID NO: 4267 - DNA, 17 bp, Artificial Sequence
  Synthetic
cgaugctttttcatggu

SEQ ID NO: 4268 - DNA, 17 bp, Artificial Sequence
  Synthetic
gcgatgctttttcaugg

SEQ ID NO: 4269 - DNA, 17 bp, Artificial Sequence
  Synthetic
agcgatgctttttcaug

SEQ ID NO: 4270 - DNA, 17 bp, Artificial Sequence
  Synthetic
uagcgatgctttttcau

SEQ ID NO: 4271 - DNA, 17 bp, Artificial Sequence
  Synthetic
uuagcgatgcttttuca

SEQ ID NO: 4272 - DNA, 17 bp, Artificial Sequence
  Synthetic
guuagcgatgctttuuc

SEQ ID NO: 4273 - DNA, 17 bp, Artificial Sequence
  Synthetic
cguuagcgatgcttuuu

SEQ ID NO: 4274 - DNA, 17 bp, Artificial Sequence
  Synthetic
gcgutagcgatgctuuu

SEQ ID NO: 4275 - DNA, 17 bp, Artificial Sequence
  Synthetic
ggcgttagcgatgcuuu

SEQ ID NO: 4276 - DNA, 17 bp, Artificial Sequence
  Synthetic
uggcgttagcgatgcuu

SEQ ID NO: 4277 - DNA, 17 bp, Artificial Sequence
  Synthetic
guggcgttagcgatgcu

SEQ ID NO: 4278 - DNA, 17 bp, Artificial Sequence
  Synthetic
uguggcgttagcgaugc

SEQ ID NO: 4279 - DNA, 17 bp, Artificial Sequence
  Synthetic
guguggcgttagcgaug

SEQ ID NO: 4280 - DNA, 17 bp, Artificial Sequence
  Synthetic
agugtggcgttagcgau

SEQ ID NO: 4281 - DNA, 17 bp, Artificial Sequence
  Synthetic
cagugtggcgttagcga

SEQ ID NO: 4282 - DNA, 17 bp, Artificial Sequence
  Synthetic
ucagtgtggcgttagcg

SEQ ID NO: 4283 - DNA, 17 bp, Artificial Sequence
  Synthetic
cucagtgtggcgttagc

SEQ ID NO: 4284 - DNA, 17 bp, Artificial Sequence
  Synthetic
acucagtgtggcgtuag

SEQ ID NO: 4285 - DNA, 17 bp, Artificial Sequence
  Synthetic
aacucagtgtggcguua

SEQ ID NO: 4286 - DNA, 17 bp, Artificial Sequence
  Synthetic
uaactcagtgtggcguu

SEQ ID NO: 4287 - DNA, 17 bp, Artificial Sequence
  Synthetic
uuaactcagtgtggcgu

SEQ ID NO: 4288 - DNA, 17 bp, Artificial Sequence
  Synthetic
auuaactcagtgtggcg

SEQ ID NO: 4289 - DNA, 17 bp, Artificial Sequence
  Synthetic
aauuaactcagtgtggc

SEQ ID NO: 4290 - DNA, 17 bp, Artificial Sequence
  Synthetic
uaautaactcagtgugg

SEQ ID NO: 4291 - DNA, 17 bp, Artificial Sequence
  Synthetic
uuaattaactcagtgug

SEQ ID NO: 4292 - DNA, 17 bp, Artificial Sequence
  Synthetic
guuaattaactcagugu

SEQ ID NO: 4293 - DNA, 17 bp, Artificial Sequence
  Synthetic
aguuaattaactcagug

SEQ ID NO: 4294 - DNA, 17 bp, Artificial Sequence
  Synthetic
cagutaattaactcagu

SEQ ID NO: 4295 - DNA, 17 bp, Artificial Sequence
  Synthetic
acagttaattaactcag

SEQ ID NO: 4296 - DNA, 17 bp, Artificial Sequence
  Synthetic
cacagttaattaacuca

SEQ ID NO: 4297 - DNA, 17 bp, Artificial Sequence
  Synthetic
acacagttaattaacuc

SEQ ID NO: 4298 - DNA, 17 bp, Artificial Sequence
  Synthetic
cacacagttaattaacu

SEQ ID NO: 4299 - DNA, 17 bp, Artificial Sequence
  Synthetic
gcacacagttaattaac

SEQ ID NO: 4300 - DNA, 17 bp, Artificial Sequence
  Synthetic
agcacacagttaatuaa

SEQ ID NO: 4301 - DNA, 17 bp, Artificial Sequence
  Synthetic
aagcacacagttaauua

SEQ ID NO: 4302 - DNA, 17 bp, Artificial Sequence
  Synthetic
gaagcacacagttaauu

SEQ ID NO: 4303 - DNA, 17 bp, Artificial Sequence
  Synthetic
ggaagcacacagttaau

SEQ ID NO: 4304 - DNA, 17 bp, Artificial Sequence
  Synthetic
uggaagcacacagtuaa

SEQ ID NO: 4305 - RNA, 17 nt, Artificial Sequence
  Synthetic
uuggaagcacacaguua

SEQ ID NO: 4306 - RNA, 17 nt, Artificial Sequence
  Synthetic
guuggaagcacacaguu

SEQ ID NO: 4307 - RNA, 17 nt, Artificial Sequence
  Synthetic
uguuggaagcacacagu

SEQ ID NO: 4308 - DNA, 17 bp, Artificial Sequence
  Synthetic
cugutggaagcacacag

SEQ ID NO: 4309 - DNA, 17 bp, Artificial Sequence
  Synthetic
ucugttggaagcacaca

SEQ ID NO: 4310 - DNA, 17 bp, Artificial Sequence
  Synthetic
uucugttggaagcacac

SEQ ID NO: 4311 - DNA, 17 bp, Artificial Sequence
  Synthetic
uuuctgttggaagcaca

SEQ ID NO: 4312 - DNA, 17 bp, Artificial Sequence
  Synthetic
uuuuctgttggaagcac

SEQ ID NO: 4313 - DNA, 17 bp, Artificial Sequence
  Synthetic
auuutctgttggaagca

SEQ ID NO: 4314 - DNA, 17 bp, Artificial Sequence
  Synthetic
cauuttctgttggaagc

SEQ ID NO: 4315 - DNA, 17 bp, Artificial Sequence
  Synthetic
gcautttctgttggaag

SEQ ID NO: 4316 - DNA, 17 bp, Artificial Sequence
  Synthetic
ugcattttctgttggaa

SEQ ID NO: 4317 - DNA, 17 bp, Artificial Sequence
  Synthetic
gugcattttctgttgga

SEQ ID NO: 4318 - DNA, 17 bp, Artificial Sequence
  Synthetic
ugugcattttctgtugg

SEQ ID NO: 4319 - DNA, 17 bp, Artificial Sequence
  Synthetic
cugugcattttctguug

SEQ ID NO: 4320 - DNA, 17 bp, Artificial Sequence
  Synthetic
ccugtgcattttctguu

SEQ ID NO: 4321 - DNA, 17 bp, Artificial Sequence
  Synthetic
uccugtgcattttcugu

SEQ ID NO: 4322 - DNA, 17 bp, Artificial Sequence
  Synthetic
cucctgtgcattttcug

SEQ ID NO: 4323 - DNA, 17 bp, Artificial Sequence
  Synthetic
acucctgtgcatttucu

SEQ ID NO: 4324 - DNA, 17 bp, Artificial Sequence
  Synthetic
cacucctgtgcattuuc

SEQ ID NO: 4325 - DNA, 17 bp, Artificial Sequence
  Synthetic
ucactcctgtgcatuuu

SEQ ID NO: 4326 - DNA, 17 bp, Artificial Sequence
  Synthetic
cucactcctgtgcauuu

SEQ ID NO: 4327 - DNA, 17 bp, Artificial Sequence
  Synthetic
ccucactcctgtgcauu

SEQ ID NO: 4328 - DNA, 17 bp, Artificial Sequence
  Synthetic
uccucactcctgtgcau

SEQ ID NO: 4329 - DNA, 17 bp, Artificial Sequence
  Synthetic
gucctcactcctgtgca

SEQ ID NO: 4330 - DNA, 17 bp, Artificial Sequence
  Synthetic
cgucctcactcctgugc

SEQ ID NO: 4331 - DNA, 17 bp, Artificial Sequence
  Synthetic
gcgucctcactcctgug

SEQ ID NO: 4332 - DNA, 17 bp, Artificial Sequence
  Synthetic
ggcgtcctcactccugu

SEQ ID NO: 4333 - DNA, 17 bp, Artificial Sequence
  Synthetic
cggcgtcctcactccug

SEQ ID NO: 4334 - DNA, 17 bp, Artificial Sequence
  Synthetic
ucggcgtcctcactccu

SEQ ID NO: 4335 - DNA, 17 bp, Artificial Sequence
  Synthetic
aucggcgtcctcacucc

SEQ ID NO: 4336 - DNA, 17 bp, Artificial Sequence
  Synthetic
caucggcgtcctcacuc

SEQ ID NO: 4337 - DNA, 17 bp, Artificial Sequence
  Synthetic
ucaucggcgtcctcacu

SEQ ID NO: 4338 - DNA, 17 bp, Artificial Sequence
  Synthetic
gucatcggcgtcctcac

SEQ ID NO: 4339 - DNA, 17 bp, Artificial Sequence
  Synthetic
ggucatcggcgtccuca

SEQ ID NO: 4340 - DNA, 17 bp, Artificial Sequence
  Synthetic
aggucatcggcgtccuc

SEQ ID NO: 4341 - DNA, 17 bp, Artificial Sequence
  Synthetic
uaggtcatcggcgtccu

SEQ ID NO: 4342 - DNA, 17 bp, Artificial Sequence
  Synthetic
auaggtcatcggcgucc

SEQ ID NO: 4343 - DNA, 17 bp, Artificial Sequence
  Synthetic
cauaggtcatcggcguc

SEQ ID NO: 4344 - DNA, 17 bp, Artificial Sequence
  Synthetic
ucauaggtcatcggcgu

SEQ ID NO: 4345 - DNA, 17 bp, Artificial Sequence
  Synthetic
uucataggtcatcggcg

SEQ ID NO: 4346 - DNA, 17 bp, Artificial Sequence
  Synthetic
cuucataggtcatcggc

SEQ ID NO: 4347 - DNA, 17 bp, Artificial Sequence
  Synthetic
acuucataggtcatcgg

SEQ ID NO: 4348 - DNA, 17 bp, Artificial Sequence
  Synthetic
gacutcataggtcaucg

SEQ ID NO: 4349 - DNA, 17 bp, Artificial Sequence
  Synthetic
ugacttcataggtcauc

SEQ ID NO: 4350 - DNA, 17 bp, Artificial Sequence
  Synthetic
uugacttcataggtcau

SEQ ID NO: 4351 - DNA, 17 bp, Artificial Sequence
  Synthetic
uuugacttcatagguca

SEQ ID NO: 4352 - DNA, 17 bp, Artificial Sequence
  Synthetic
auuugacttcatagguc

SEQ ID NO: 4353 - DNA, 17 bp, Artificial Sequence
  Synthetic
aauutgacttcataggu

SEQ ID NO: 4354 - DNA, 17 bp, Artificial Sequence
  Synthetic
aaauttgacttcatagg

SEQ ID NO: 4355 - DNA, 17 bp, Artificial Sequence
  Synthetic
caaatttgacttcauag

SEQ ID NO: 4356 - DNA, 17 bp, Artificial Sequence
  Synthetic
ucaaatttgacttcaua

SEQ ID NO: 4357 - DNA, 17 bp, Artificial Sequence
  Synthetic
gucaaatttgacttcau

SEQ ID NO: 4358 - DNA, 17 bp, Artificial Sequence
  Synthetic
agucaaatttgactuca

SEQ ID NO: 4359 - DNA, 17 bp, Artificial Sequence
  Synthetic
aagucaaatttgacuuc

SEQ ID NO: 4360 - DNA, 17 bp, Artificial Sequence
  Synthetic
aaagtcaaatttgacuu

SEQ ID NO: 4361 - DNA, 17 bp, Artificial Sequence
  Synthetic
uaaagtcaaatttgacu

SEQ ID NO: 4362 - DNA, 17 bp, Artificial Sequence
  Synthetic
guaaagtcaaatttgac

SEQ ID NO: 4363 - DNA, 17 bp, Artificial Sequence
  Synthetic
gguaaagtcaaattuga

SEQ ID NO: 4364 - DNA, 17 bp, Artificial Sequence
  Synthetic
agguaaagtcaaatuug

SEQ ID NO: 4365 - DNA, 17 bp, Artificial Sequence
  Synthetic
aaggtaaagtcaaauuu

SEQ ID NO: 4366 - DNA, 17 bp, Artificial Sequence
  Synthetic
aaaggtaaagtcaaauu

SEQ ID NO: 4367 - DNA, 17 bp, Artificial Sequence
  Synthetic
gaaaggtaaagtcaaau

SEQ ID NO: 4368 - DNA, 17 bp, Artificial Sequence
  Synthetic
ggaaaggtaaagtcaaa

SEQ ID NO: 4369 - DNA, 17 bp, Artificial Sequence
  Synthetic
aggaaaggtaaagtcaa

SEQ ID NO: 4370 - DNA, 17 bp, Artificial Sequence
  Synthetic
gaggaaaggtaaaguca

SEQ ID NO: 4371 - DNA, 17 bp, Artificial Sequence
  Synthetic
ugaggaaaggtaaaguc

SEQ ID NO: 4372 - DNA, 17 bp, Artificial Sequence
  Synthetic
uugaggaaaggtaaagu

SEQ ID NO: 4373 - DNA, 17 bp, Artificial Sequence
  Synthetic
uuugaggaaaggtaaag

SEQ ID NO: 4374 - DNA, 17 bp, Artificial Sequence
  Synthetic
cuuugaggaaaggtaaa

SEQ ID NO: 4375 - DNA, 17 bp, Artificial Sequence
  Synthetic
ucuutgaggaaagguaa

SEQ ID NO: 4376 - DNA, 17 bp, Artificial Sequence
  Synthetic
aucuttgaggaaaggua

SEQ ID NO: 4377 - DNA, 17 bp, Artificial Sequence
  Synthetic
uauctttgaggaaaggu

SEQ ID NO: 4378 - DNA, 17 bp, Artificial Sequence
  Synthetic
auauctttgaggaaagg

SEQ ID NO: 4379 - DNA, 17 bp, Artificial Sequence
  Synthetic
uauatctttgaggaaag

SEQ ID NO: 4380 - DNA, 17 bp, Artificial Sequence
  Synthetic
auauatctttgaggaaa

SEQ ID NO: 4381 - DNA, 17 bp, Artificial Sequence
  Synthetic
aauatatctttgaggaa

SEQ ID NO: 4382 - DNA, 17 bp, Artificial Sequence
  Synthetic
aaauatatctttgagga

SEQ ID NO: 4383 - DNA, 17 bp, Artificial Sequence
  Synthetic
uaaatatatctttgagg

SEQ ID NO: 4384 - DNA, 17 bp, Artificial Sequence
  Synthetic
uuaaatatatctttgag

SEQ ID NO: 4385 - DNA, 17 bp, Artificial Sequence
  Synthetic
uuuaaatatatcttuga

SEQ ID NO: 4386 - DNA, 17 bp, Artificial Sequence
  Synthetic
guuuaaatatatctuug

SEQ ID NO: 4387 - DNA, 17 bp, Artificial Sequence
  Synthetic
gguutaaatatatcuuu

SEQ ID NO: 4388 - DNA, 17 bp, Artificial Sequence
  Synthetic
ugguttaaatatatcuu

SEQ ID NO: 4389 - DNA, 17 bp, Artificial Sequence
  Synthetic
uuggtttaaatataucu

SEQ ID NO: 4390 - DNA, 17 bp, Artificial Sequence
  Synthetic
guuggtttaaatatauc

SEQ ID NO: 4391 - DNA, 17 bp, Artificial Sequence
  Synthetic
gguuggtttaaatauau

SEQ ID NO: 4392 - DNA, 17 bp, Artificial Sequence
  Synthetic
aggutggtttaaataua

SEQ ID NO: 4393 - DNA, 17 bp, Artificial Sequence
  Synthetic
gaggttggtttaaauau

SEQ ID NO: 4394 - DNA, 17 bp, Artificial Sequence
  Synthetic
ugaggttggtttaaaua

SEQ ID NO: 4395 - DNA, 17 bp, Artificial Sequence
  Synthetic
augaggttggtttaaau

SEQ ID NO: 4396 - DNA, 17 bp, Artificial Sequence
  Synthetic
caugaggttggtttaaa

SEQ ID NO: 4397 - DNA, 17 bp, Artificial Sequence
  Synthetic
gcaugaggttggttuaa

SEQ ID NO: 4398 - DNA, 17 bp, Artificial Sequence
  Synthetic
ggcatgaggttggtuua

SEQ ID NO: 4399 - DNA, 17 bp, Artificial Sequence
  Synthetic
gggcatgaggttgguuu

SEQ ID NO: 4400 - DNA, 17 bp, Artificial Sequence
  Synthetic
agggcatgaggttgguu

SEQ ID NO: 4401 - DNA, 17 bp, Artificial Sequence
  Synthetic
cagggcatgaggttggu

SEQ ID NO: 4402 - DNA, 17 bp, Artificial Sequence
  Synthetic
acagggcatgaggtugg

SEQ ID NO: 4403 - DNA, 17 bp, Artificial Sequence
  Synthetic
aacagggcatgagguug

SEQ ID NO: 4404 - DNA, 17 bp, Artificial Sequence
  Synthetic
caacagggcatgagguu

SEQ ID NO: 4405 - DNA, 17 bp, Artificial Sequence
  Synthetic
ucaacagggcatgaggu

SEQ ID NO: 4406 - DNA, 17 bp, Artificial Sequence
  Synthetic
aucaacagggcatgagg

SEQ ID NO: 4407 - DNA, 17 bp, Artificial Sequence
  Synthetic
uaucaacagggcatgag

SEQ ID NO: 4408 - RNA, 17 nt, Artificial Sequence
  Synthetic
uuaucaacagggcauga

SEQ ID NO: 4409 - DNA, 17 bp, Artificial Sequence
  Synthetic
uuuatcaacagggcaug

SEQ ID NO: 4410 - DNA, 17 bp, Artificial Sequence
  Synthetic
guuuatcaacagggcau

SEQ ID NO: 4411 - DNA, 17 bp, Artificial Sequence
  Synthetic
gguutatcaacagggca

SEQ ID NO: 4412 - DNA, 17 bp, Artificial Sequence
  Synthetic
ugguttatcaacagggc

SEQ ID NO: 4413 - DNA, 17 bp, Artificial Sequence
  Synthetic
uuggtttatcaacaggg

SEQ ID NO: 4414 - DNA, 17 bp, Artificial Sequence
  Synthetic
auuggtttatcaacagg

SEQ ID NO: 4415 - DNA, 17 bp, Artificial Sequence
  Synthetic
gauuggtttatcaacag

SEQ ID NO: 4416 - DNA, 17 bp, Artificial Sequence
  Synthetic
ugautggtttatcaaca

SEQ ID NO: 4417 - DNA, 17 bp, Artificial Sequence
  Synthetic
uugattggtttatcaac

SEQ ID NO: 4418 - DNA, 17 bp, Artificial Sequence
  Synthetic
uuugattggtttatcaa

SEQ ID NO: 4419 - DNA, 17 bp, Artificial Sequence
  Synthetic
auuugattggtttauca

SEQ ID NO: 4420 - DNA, 17 bp, Artificial Sequence
  Synthetic
aauutgattggtttauc

SEQ ID NO: 4421 - DNA, 17 bp, Artificial Sequence
  Synthetic
caauttgattggttuau

SEQ ID NO: 4422 - DNA, 17 bp, Artificial Sequence
  Synthetic
ccaatttgattggtuua

SEQ ID NO: 4423 - DNA, 17 bp, Artificial Sequence
  Synthetic
accaatttgattgguuu

SEQ ID NO: 4424 - DNA, 17 bp, Artificial Sequence
  Synthetic
uaccaatttgattgguu

SEQ ID NO: 4425 - DNA, 17 bp, Artificial Sequence
  Synthetic
uuaccaatttgattggu

SEQ ID NO: 4426 - DNA, 17 bp, Artificial Sequence
  Synthetic
uuuaccaatttgatugg

SEQ ID NO: 4427 - DNA, 17 bp, Artificial Sequence
  Synthetic
cuuuaccaatttgauug

SEQ ID NO: 4428 - DNA, 17 bp, Artificial Sequence
  Synthetic
ucuutaccaatttgauu

SEQ ID NO: 4429 - DNA, 17 bp, Artificial Sequence
  Synthetic
gucuttaccaatttgau

SEQ ID NO: 4430 - DNA, 17 bp, Artificial Sequence
  Synthetic
gguctttaccaattuga

SEQ ID NO: 4431 - DNA, 17 bp, Artificial Sequence
  Synthetic
agguctttaccaatuug

SEQ ID NO: 4432 - DNA, 17 bp, Artificial Sequence
  Synthetic
uaggtctttaccaauuu

SEQ ID NO: 4433 - DNA, 17 bp, Artificial Sequence
  Synthetic
uuaggtctttaccaauu

SEQ ID NO: 4434 - DNA, 17 bp, Artificial Sequence
  Synthetic
uuuaggtctttaccaau

SEQ ID NO: 4435 - DNA, 17 bp, Artificial Sequence
  Synthetic
uuuuaggtctttaccaa

SEQ ID NO: 4436 - DNA, 17 bp, Artificial Sequence
  Synthetic
guuutaggtctttacca

SEQ ID NO: 4437 - DNA, 17 bp, Artificial Sequence
  Synthetic
gguuttaggtctttacc

SEQ ID NO: 4438 - DNA, 17 bp, Artificial Sequence
  Synthetic
uggutttaggtcttuac

SEQ ID NO: 4439 - DNA, 17 bp, Artificial Sequence
  Synthetic
uuggttttaggtctuua

SEQ ID NO: 4440 - DNA, 17 bp, Artificial Sequence
  Synthetic
uuuggttttaggtcuuu

SEQ ID NO: 4441 - DNA, 17 bp, Artificial Sequence
  Synthetic
uuuuggttttaggtcuu

SEQ ID NO: 4442 - DNA, 17 bp, Artificial Sequence
  Synthetic
guuutggttttaggucu

SEQ ID NO: 4443 - DNA, 17 bp, Artificial Sequence
  Synthetic
uguuttggttttagguc

SEQ ID NO: 4444 - DNA, 17 bp, Artificial Sequence
  Synthetic
uugutttggttttaggu

SEQ ID NO: 4445 - DNA, 17 bp, Artificial Sequence
  Synthetic
uuugttttggttttagg

SEQ ID NO: 4446 - DNA, 17 bp, Artificial Sequence
  Synthetic
auuugttttggtttuag

SEQ ID NO: 4447 - DNA, 17 bp, Artificial Sequence
  Synthetic
uauutgttttggttuua

SEQ ID NO: 4448 - DNA, 17 bp, Artificial Sequence
  Synthetic
uuauttgttttggtuuu

SEQ ID NO: 4449 - DNA, 17 bp, Artificial Sequence
  Synthetic
uuuatttgttttgguuu

SEQ ID NO: 4450 - DNA, 17 bp, Artificial Sequence
  Synthetic
cuuuatttgttttgguu

SEQ ID NO: 4451 - DNA, 17 bp, Artificial Sequence
  Synthetic
ucuutatttgttttggu

SEQ ID NO: 4452 - DNA, 17 bp, Artificial Sequence
  Synthetic
uucuttatttgtttugg

SEQ ID NO: 4453 - DNA, 17 bp, Artificial Sequence
  Synthetic
uuuctttatttgttuug

SEQ ID NO: 4454 - DNA, 17 bp, Artificial Sequence
  Synthetic
guuuctttatttgtuuu

SEQ ID NO: 4455 - DNA, 17 bp, Artificial Sequence
  Synthetic
uguutctttatttguuu

SEQ ID NO: 4456 - DNA, 17 bp, Artificial Sequence
  Synthetic
guguttctttatttguu

SEQ ID NO: 4457 - DNA, 17 bp, Artificial Sequence
  Synthetic
ugugtttctttattugu

SEQ ID NO: 4458 - DNA, 17 bp, Artificial Sequence
  Synthetic
uugugtttctttatuug

SEQ ID NO: 4459 - DNA, 17 bp, Artificial Sequence
  Synthetic
uuugtgtttctttauuu

SEQ ID NO: 4460 - DNA, 17 bp, Artificial Sequence
  Synthetic
uuuugtgtttctttauu

SEQ ID NO: 4461 - DNA, 17 bp, Artificial Sequence
  Synthetic
guuutgtgtttcttuau

SEQ ID NO: 4462 - DNA, 17 bp, Artificial Sequence
  Synthetic
gguuttgtgtttctuua

SEQ ID NO: 4463 - DNA, 17 bp, Artificial Sequence
  Synthetic
gggutttgtgtttcuuu

SEQ ID NO: 4464 - DNA, 17 bp, Artificial Sequence
  Synthetic
agggttttgtgtttcuu

SEQ ID NO: 4465 - DNA, 17 bp, Artificial Sequence
  Synthetic
gagggttttgtgttucu

SEQ ID NO: 4466 - DNA, 17 bp, Artificial Sequence
  Synthetic
ugagggttttgtgtuuc

SEQ ID NO: 4467 - DNA, 17 bp, Artificial Sequence
  Synthetic
cugagggttttgtguuu

SEQ ID NO: 4468 - DNA, 17 bp, Artificial Sequence
  Synthetic
acugagggttttgtguu

SEQ ID NO: 4469 - DNA, 17 bp, Artificial Sequence
  Synthetic
cacugagggttttgugu

SEQ ID NO: 4470 - DNA, 17 bp, Artificial Sequence
  Synthetic
gcactgagggttttgug

SEQ ID NO: 4471 - DNA, 17 bp, Artificial Sequence
  Synthetic
agcactgagggtttugu

SEQ ID NO: 4472 - DNA, 17 bp, Artificial Sequence
  Synthetic
cagcactgagggttuug

SEQ ID NO: 4473 - DNA, 17 bp, Artificial Sequence
  Synthetic
ccagcactgagggtuuu

SEQ ID NO: 4474 - DNA, 17 bp, Artificial Sequence
  Synthetic
uccagcactgaggguuu

SEQ ID NO: 4475 - DNA, 17 bp, Artificial Sequence
  Synthetic
cuccagcactgaggguu

SEQ ID NO: 4476 - DNA, 17 bp, Artificial Sequence
  Synthetic
ucuccagcactgagggu

SEQ ID NO: 4477 - DNA, 17 bp, Artificial Sequence
  Synthetic
uucuccagcactgaggg

SEQ ID NO: 4478 - DNA, 17 bp, Artificial Sequence
  Synthetic
cuuctccagcactgagg

SEQ ID NO: 4479 - DNA, 17 bp, Artificial Sequence
  Synthetic
ucuuctccagcactgag

SEQ ID NO: 4480 - DNA, 17 bp, Artificial Sequence
  Synthetic
cucutctccagcacuga

SEQ ID NO: 4481 - DNA, 17 bp, Artificial Sequence
  Synthetic
acucttctccagcacug

SEQ ID NO: 4482 - DNA, 17 bp, Artificial Sequence
  Synthetic
gacucttctccagcacu

SEQ ID NO: 4483 - DNA, 17 bp, Artificial Sequence
  Synthetic
ugactcttctccagcac

SEQ ID NO: 4484 - DNA, 17 bp, Artificial Sequence
  Synthetic
cugactcttctccagca

SEQ ID NO: 4485 - DNA, 17 bp, Artificial Sequence
  Synthetic
acugactcttctccagc

SEQ ID NO: 4486 - DNA, 17 bp, Artificial Sequence
  Synthetic
cacugactcttctccag

SEQ ID NO: 4487 - DNA, 17 bp, Artificial Sequence
  Synthetic
ucactgactcttctcca

SEQ ID NO: 4488 - DNA, 17 bp, Artificial Sequence
  Synthetic
cucactgactcttcucc

SEQ ID NO: 4489 - DNA, 17 bp, Artificial Sequence
  Synthetic
ucucactgactcttcuc

SEQ ID NO: 4490 - DNA, 17 bp, Artificial Sequence
  Synthetic
gucucactgactctucu

SEQ ID NO: 4491 - DNA, 17 bp, Artificial Sequence
  Synthetic
gguctcactgactcuuc

SEQ ID NO: 4492 - DNA, 17 bp, Artificial Sequence
  Synthetic
ugguctcactgactcuu

SEQ ID NO: 4493 - DNA, 17 bp, Artificial Sequence
  Synthetic
cuggtctcactgacucu

SEQ ID NO: 4494 - DNA, 17 bp, Artificial Sequence
  Synthetic
gcuggtctcactgacuc

SEQ ID NO: 4495 - DNA, 17 bp, Artificial Sequence
  Synthetic
ugcuggtctcactgacu

SEQ ID NO: 4496 - DNA, 17 bp, Artificial Sequence
  Synthetic
gugctggtctcactgac

SEQ ID NO: 4497 - DNA, 17 bp, Artificial Sequence
  Synthetic
agugctggtctcacuga

SEQ ID NO: 4498 - DNA, 17 bp, Artificial Sequence
  Synthetic
gagugctggtctcacug

SEQ ID NO: 4499 - DNA, 17 bp, Artificial Sequence
  Synthetic
agagtgctggtctcacu

SEQ ID NO: 4500 - DNA, 17 bp, Artificial Sequence
  Synthetic
gagagtgctggtctcac

SEQ ID NO: 4501 - DNA, 17 bp, Artificial Sequence
  Synthetic
ugagagtgctggtcuca

SEQ ID NO: 4502 - DNA, 17 bp, Artificial Sequence
  Synthetic
uugagagtgctggtcuc

SEQ ID NO: 4503 - DNA, 17 bp, Artificial Sequence
  Synthetic
uuugagagtgctggucu

SEQ ID NO: 4504 - DNA, 17 bp, Artificial Sequence
  Synthetic
guuugagagtgctgguc

SEQ ID NO: 4505 - DNA, 17 bp, Artificial Sequence
  Synthetic
uguutgagagtgctggu

SEQ ID NO: 4506 - DNA, 17 bp, Artificial Sequence
  Synthetic
guguttgagagtgcugg

SEQ ID NO: 4507 - DNA, 17 bp, Artificial Sequence
  Synthetic
agugtttgagagtgcug

SEQ ID NO: 4508 - DNA, 17 bp, Artificial Sequence
  Synthetic
cagugtttgagagtgcu

SEQ ID NO: 4509 - DNA, 17 bp, Artificial Sequence
  Synthetic
ccagtgtttgagagugc

SEQ ID NO: 4510 - DNA, 17 bp, Artificial Sequence
  Synthetic
uccagtgtttgagagug

SEQ ID NO: 4511 - DNA, 17 bp, Artificial Sequence
  Synthetic
uuccagtgtttgagagu

SEQ ID NO: 4512 - DNA, 17 bp, Artificial Sequence
  Synthetic
guuccagtgtttgagag

SEQ ID NO: 4513 - DNA, 17 bp, Artificial Sequence
  Synthetic
aguuccagtgtttgaga

SEQ ID NO: 4514 - DNA, 17 bp, Artificial Sequence
  Synthetic
cagutccagtgtttgag

SEQ ID NO: 4515 - DNA, 17 bp, Artificial Sequence
  Synthetic
ccagttccagtgttuga

SEQ ID NO: 4516 - DNA, 17 bp, Artificial Sequence
  Synthetic
uccagttccagtgtuug

SEQ ID NO: 4517 - DNA, 17 bp, Artificial Sequence
  Synthetic
guccagttccagtguuu

SEQ ID NO: 4518 - DNA, 17 bp, Artificial Sequence
  Synthetic
cguccagttccagtguu

SEQ ID NO: 4519 - DNA, 17 bp, Artificial Sequence
  Synthetic
acguccagttccagugu

SEQ ID NO: 4520 - DNA, 17 bp, Artificial Sequence
  Synthetic
aacgtccagttccagug

SEQ ID NO: 4521 - DNA, 17 bp, Artificial Sequence
  Synthetic
gaacgtccagttccagu

SEQ ID NO: 4522 - DNA, 17 bp, Artificial Sequence
  Synthetic
cgaacgtccagttccag

SEQ ID NO: 4523 - DNA, 17 bp, Artificial Sequence
  Synthetic
acgaacgtccagttcca

SEQ ID NO: 4524 - DNA, 17 bp, Artificial Sequence
  Synthetic
uacgaacgtccagtucc

SEQ ID NO: 4525 - DNA, 17 bp, Artificial Sequence
  Synthetic
guacgaacgtccaguuc

SEQ ID NO: 4526 - DNA, 17 bp, Artificial Sequence
  Synthetic
uguacgaacgtccaguu

SEQ ID NO: 4527 - DNA, 17 bp, Artificial Sequence
  Synthetic
cuguacgaacgtccagu

SEQ ID NO: 4528 - DNA, 17 bp, Artificial Sequence
  Synthetic
acugtacgaacgtccag

SEQ ID NO: 4529 - DNA, 17 bp, Artificial Sequence
  Synthetic
gacugtacgaacgtcca

SEQ ID NO: 4530 - DNA, 17 bp, Artificial Sequence
  Synthetic
agactgtacgaacgucc

SEQ ID NO: 4531 - DNA, 17 bp, Artificial Sequence
  Synthetic
aagactgtacgaacguc

SEQ ID NO: 4532 - DNA, 17 bp, Artificial Sequence
  Synthetic
aaagactgtacgaacgu

SEQ ID NO: 4533 - DNA, 17 bp, Artificial Sequence
  Synthetic
uaaagactgtacgaacg

SEQ ID NO: 4534 - DNA, 17 bp, Artificial Sequence
  Synthetic
guaaagactgtacgaac

SEQ ID NO: 4535 - DNA, 17 bp, Artificial Sequence
  Synthetic
cguaaagactgtacgaa

SEQ ID NO: 4536 - DNA, 17 bp, Artificial Sequence
  Synthetic
ccguaaagactgtacga

SEQ ID NO: 4537 - DNA, 17 bp, Artificial Sequence
  Synthetic
uccgtaaagactgtacg

SEQ ID NO: 4538 - DNA, 17 bp, Artificial Sequence
  Synthetic
uuccgtaaagactguac

SEQ ID NO: 4539 - DNA, 17 bp, Artificial Sequence
  Synthetic
cuuccgtaaagactgua

SEQ ID NO: 4540 - DNA, 17 bp, Artificial Sequence
  Synthetic
ucuuccgtaaagacugu

SEQ ID NO: 4541 - DNA, 17 bp, Artificial Sequence
  Synthetic
gucutccgtaaagacug

SEQ ID NO: 4542 - DNA, 17 bp, Artificial Sequence
  Synthetic
ugucttccgtaaagacu

SEQ ID NO: 4543 - DNA, 17 bp, Artificial Sequence
  Synthetic
gugucttccgtaaagac

SEQ ID NO: 4544 - DNA, 17 bp, Artificial Sequence
  Synthetic
agugtcttccgtaaaga

SEQ ID NO: 4545 - DNA, 17 bp, Artificial Sequence
  Synthetic
aagugtcttccgtaaag

SEQ ID NO: 4546 - DNA, 17 bp, Artificial Sequence
  Synthetic
caagtgtcttccgtaaa

SEQ ID NO: 4547 - DNA, 17 bp, Artificial Sequence
  Synthetic
ccaagtgtcttccguaa

SEQ ID NO: 4548 - DNA, 17 bp, Artificial Sequence
  Synthetic
accaagtgtcttccgua

SEQ ID NO: 4549 - DNA, 17 bp, Artificial Sequence
  Synthetic
gaccaagtgtcttccgu

SEQ ID NO: 4550 - DNA, 17 bp, Artificial Sequence
  Synthetic
ugaccaagtgtcttccg

SEQ ID NO: 4551 - DNA, 17 bp, Artificial Sequence
  Synthetic
uugaccaagtgtctucc

SEQ ID NO: 4552 - DNA, 17 bp, Artificial Sequence
  Synthetic
guugaccaagtgtcuuc

SEQ ID NO: 4553 - DNA, 17 bp, Artificial Sequence
  Synthetic
cguugaccaagtgtcuu

SEQ ID NO: 4554 - DNA, 17 bp, Artificial Sequence
  Synthetic
acgutgaccaagtgucu

SEQ ID NO: 4555 - DNA, 17 bp, Artificial Sequence
  Synthetic
uacgttgaccaagtguc

SEQ ID NO: 4556 - DNA, 17 bp, Artificial Sequence
  Synthetic
guacgttgaccaagugu

SEQ ID NO: 4557 - DNA, 17 bp, Artificial Sequence
  Synthetic
uguacgttgaccaagug

SEQ ID NO: 4558 - DNA, 17 bp, Artificial Sequence
  Synthetic
guguacgttgaccaagu

SEQ ID NO: 4559 - DNA, 17 bp, Artificial Sequence
  Synthetic
ggugtacgttgaccaag

SEQ ID NO: 4560 - DNA, 17 bp, Artificial Sequence
  Synthetic
cggugtacgttgaccaa

SEQ ID NO: 4561 - DNA, 17 bp, Artificial Sequence
  Synthetic
ucggtgtacgttgacca

SEQ ID NO: 4562 - DNA, 17 bp, Artificial Sequence
  Synthetic
cucggtgtacgttgacc

SEQ ID NO: 4563 - DNA, 17 bp, Artificial Sequence
  Synthetic
ucucggtgtacgttgac

SEQ ID NO: 4564 - DNA, 17 bp, Artificial Sequence
  Synthetic
gucucggtgtacgtuga

SEQ ID NO: 4565 - DNA, 17 bp, Artificial Sequence
  Synthetic
gguctcggtgtacguug

SEQ ID NO: 4566 - DNA, 17 bp, Artificial Sequence
  Synthetic
ggguctcggtgtacguu

SEQ ID NO: 4567 - DNA, 17 bp, Artificial Sequence
  Synthetic
agggtctcggtgtacgu

SEQ ID NO: 4568 - DNA, 17 bp, Artificial Sequence
  Synthetic
aagggtctcggtgtacg

SEQ ID NO: 4569 - DNA, 17 bp, Artificial Sequence
  Synthetic
uaagggtctcggtguac

SEQ ID NO: 4570 - DNA, 17 bp, Artificial Sequence
  Synthetic
auaagggtctcggtgua

SEQ ID NO: 4571 - DNA, 17 bp, Artificial Sequence
  Synthetic
aauaagggtctcggugu

SEQ ID NO: 4572 - DNA, 17 bp, Artificial Sequence
  Synthetic
gaauaagggtctcggug

SEQ ID NO: 4573 - DNA, 17 bp, Artificial Sequence
  Synthetic
ugaataagggtctcggu

SEQ ID NO: 4574 - DNA, 17 bp, Artificial Sequence
  Synthetic
gugaataagggtctcgg

SEQ ID NO: 4575 - DNA, 17 bp, Artificial Sequence
  Synthetic
ggugaataagggtcucg

SEQ ID NO: 4576 - DNA, 17 bp, Artificial Sequence
  Synthetic
uggugaataagggtcuc

SEQ ID NO: 4577 - DNA, 17 bp, Artificial Sequence
  Synthetic
guggtgaataagggucu

SEQ ID NO: 4578 - DNA, 17 bp, Artificial Sequence
  Synthetic
gguggtgaataaggguc

SEQ ID NO: 4579 - DNA, 17 bp, Artificial Sequence
  Synthetic
agguggtgaataagggu

SEQ ID NO: 4580 - DNA, 17 bp, Artificial Sequence
  Synthetic
aaggtggtgaataaggg

SEQ ID NO: 4581 - DNA, 17 bp, Artificial Sequence
  Synthetic
aaaggtggtgaataagg

SEQ ID NO: 4582 - DNA, 17 bp, Artificial Sequence
  Synthetic
caaaggtggtgaataag

SEQ ID NO: 4583 - DNA, 17 bp, Artificial Sequence
  Synthetic
ucaaaggtggtgaauaa

SEQ ID NO: 4584 - DNA, 17 bp, Artificial Sequence
  Synthetic
gucaaaggtggtgaaua

SEQ ID NO: 4585 - DNA, 17 bp, Artificial Sequence
  Synthetic
ggucaaaggtggtgaau

SEQ ID NO: 4586 - DNA, 17 bp, Artificial Sequence
  Synthetic
gggucaaaggtggtgaa

SEQ ID NO: 4587 - DNA, 17 bp, Artificial Sequence
  Synthetic
ugggtcaaaggtgguga

SEQ ID NO: 4588 - DNA, 17 bp, Artificial Sequence
  Synthetic
cugggtcaaaggtggug

SEQ ID NO: 4589 - DNA, 17 bp, Artificial Sequence
  Synthetic
acugggtcaaaggtggu

SEQ ID NO: 4590 - DNA, 17 bp, Artificial Sequence
  Synthetic
uacugggtcaaaggugg

SEQ ID NO: 4591 - DNA, 17 bp, Artificial Sequence
  Synthetic
uuactgggtcaaaggug

SEQ ID NO: 4592 - DNA, 17 bp, Artificial Sequence
  Synthetic
guuactgggtcaaaggu

SEQ ID NO: 4593 - DNA, 17 bp, Artificial Sequence
  Synthetic
aguuactgggtcaaagg

SEQ ID NO: 4594 - DNA, 17 bp, Artificial Sequence
  Synthetic
gagutactgggtcaaag

SEQ ID NO: 4595 - DNA, 17 bp, Artificial Sequence
  Synthetic
agagttactgggtcaaa

SEQ ID NO: 4596 - DNA, 17 bp, Artificial Sequence
  Synthetic
uagagttactgggtcaa

SEQ ID NO: 4597 - DNA, 17 bp, Artificial Sequence
  Synthetic
uuagagttactggguca

SEQ ID NO: 4598 - DNA, 17 bp, Artificial Sequence
  Synthetic
auuagagttactggguc

SEQ ID NO: 4599 - DNA, 17 bp, Artificial Sequence
  Synthetic
gauuagagttactgggu

SEQ ID NO: 4600 - DNA, 17 bp, Artificial Sequence
  Synthetic
agautagagttactggg

SEQ ID NO: 4601 - DNA, 17 bp, Artificial Sequence
  Synthetic
aagattagagttacugg

SEQ ID NO: 4602 - DNA, 17 bp, Artificial Sequence
  Synthetic
uaagattagagttacug

SEQ ID NO: 4603 - DNA, 17 bp, Artificial Sequence
  Synthetic
cuaagattagagttacu

SEQ ID NO: 4604 - DNA, 17 bp, Artificial Sequence
  Synthetic
ccuaagattagagtuac

SEQ ID NO: 4605 - DNA, 17 bp, Artificial Sequence
  Synthetic
uccuaagattagaguua

SEQ ID NO: 4606 - DNA, 17 bp, Artificial Sequence
  Synthetic
uucctaagattagaguu

SEQ ID NO: 4607 - DNA, 17 bp, Artificial Sequence
  Synthetic
cuucctaagattagagu

SEQ ID NO: 4608 - DNA, 17 bp, Artificial Sequence
  Synthetic
ucuucctaagattagag

SEQ ID NO: 4609 - DNA, 17 bp, Artificial Sequence
  Synthetic
uucutcctaagattaga

SEQ ID NO: 4610 - DNA, 17 bp, Artificial Sequence
  Synthetic
guucttcctaagatuag

SEQ ID NO: 4611 - DNA, 17 bp, Artificial Sequence
  Synthetic
gguucttcctaagauua

SEQ ID NO: 4612 - DNA, 17 bp, Artificial Sequence
  Synthetic
aggutcttcctaagauu

SEQ ID NO: 4613 - DNA, 17 bp, Artificial Sequence
  Synthetic
uaggttcttcctaagau

SEQ ID NO: 4614 - DNA, 17 bp, Artificial Sequence
  Synthetic
guaggttcttcctaaga

SEQ ID NO: 4615 - DNA, 17 bp, Artificial Sequence
  Synthetic
aguaggttcttcctaag

SEQ ID NO: 4616 - DNA, 17 bp, Artificial Sequence
  Synthetic
caguaggttcttccuaa

SEQ ID NO: 4617 - DNA, 17 bp, Artificial Sequence
  Synthetic
ucagtaggttcttccua

SEQ ID NO: 4618 - DNA, 17 bp, Artificial Sequence
  Synthetic
uucagtaggttcttccu

SEQ ID NO: 4619 - DNA, 17 bp, Artificial Sequence
  Synthetic
uuucagtaggttctucc

SEQ ID NO: 4620 - DNA, 17 bp, Artificial Sequence
  Synthetic
guuucagtaggttcuuc

SEQ ID NO: 4621 - DNA, 17 bp, Artificial Sequence
  Synthetic
uguutcagtaggttcuu

SEQ ID NO: 4622 - DNA, 17 bp, Artificial Sequence
  Synthetic
uuguttcagtaggtucu

SEQ ID NO: 4623 - DNA, 17 bp, Artificial Sequence
  Synthetic
uuugtttcagtagguuc

SEQ ID NO: 4624 - DNA, 17 bp, Artificial Sequence
  Synthetic
uuuugtttcagtagguu

SEQ ID NO: 4625 - DNA, 17 bp, Artificial Sequence
  Synthetic
uuuutgtttcagtaggu

SEQ ID NO: 4626 - DNA, 17 bp, Artificial Sequence
  Synthetic
uuuuttgtttcagtagg

SEQ ID NO: 4627 - DNA, 17 bp, Artificial Sequence
  Synthetic
uuuutttgtttcaguag

SEQ ID NO: 4628 - DNA, 17 bp, Artificial Sequence
  Synthetic
uuuuttttgtttcagua

SEQ ID NO: 4629 - DNA, 17 bp, Artificial Sequence
  Synthetic
auuutttttgtttcagu

SEQ ID NO: 4630 - DNA, 17 bp, Artificial Sequence
  Synthetic
gauuttttttgtttcag

SEQ ID NO: 4631 - DNA, 17 bp, Artificial Sequence
  Synthetic
ggautttttttgttuca

SEQ ID NO: 4632 - DNA, 17 bp, Artificial Sequence
  Synthetic
uggattttttttgtuuc

SEQ ID NO: 4633 - DNA, 17 bp, Artificial Sequence
  Synthetic
uuggattttttttguuu

SEQ ID NO: 4634 - DNA, 17 bp, Artificial Sequence
  Synthetic
uuuggattttttttguu

SEQ ID NO: 4635 - DNA, 17 bp, Artificial Sequence
  Synthetic
uuuuggatttttttugu

SEQ ID NO: 4636 - DNA, 17 bp, Artificial Sequence
  Synthetic
auuutggattttttuug

SEQ ID NO: 4637 - DNA, 17 bp, Artificial Sequence
  Synthetic
cauuttggatttttuuu

SEQ ID NO: 4638 - DNA, 17 bp, Artificial Sequence
  Synthetic
acautttggattttuuu

SEQ ID NO: 4639 - DNA, 17 bp, Artificial Sequence
  Synthetic
uacattttggatttuuu

SEQ ID NO: 4640 - DNA, 17 bp, Artificial Sequence
  Synthetic
cuacattttggattuuu

SEQ ID NO: 4641 - DNA, 17 bp, Artificial Sequence
  Synthetic
ucuacattttggatuuu

SEQ ID NO: 4642 - DNA, 17 bp, Artificial Sequence
  Synthetic
uucuacattttggauuu

SEQ ID NO: 4643 - DNA, 17 bp, Artificial Sequence
  Synthetic
guuctacattttggauu

SEQ ID NO: 4644 - DNA, 17 bp, Artificial Sequence
  Synthetic
uguuctacattttggau

SEQ ID NO: 4645 - DNA, 17 bp, Artificial Sequence
  Synthetic
uugutctacattttgga

SEQ ID NO: 4646 - DNA, 17 bp, Artificial Sequence
  Synthetic
cuugttctacatttugg

SEQ ID NO: 4647 - DNA, 17 bp, Artificial Sequence
  Synthetic
ucuugttctacattuug

SEQ ID NO: 4648 - DNA, 17 bp, Artificial Sequence
  Synthetic
gucutgttctacatuuu

SEQ ID NO: 4649 - DNA, 17 bp, Artificial Sequence
  Synthetic
agucttgttctacauuu

SEQ ID NO: 4650 - DNA, 17 bp, Artificial Sequence
  Synthetic
aagucttgttctacauu

SEQ ID NO: 4651 - DNA, 17 bp, Artificial Sequence
  Synthetic
caagtcttgttctacau

SEQ ID NO: 4652 - DNA, 17 bp, Artificial Sequence
  Synthetic
ucaagtcttgttctaca

SEQ ID NO: 4653 - DNA, 17 bp, Artificial Sequence
  Synthetic
uucaagtcttgttcuac

SEQ ID NO: 4654 - DNA, 17 bp, Artificial Sequence
  Synthetic
auucaagtcttgttcua

SEQ ID NO: 4655 - DNA, 17 bp, Artificial Sequence
  Synthetic
aauucaagtcttgtucu

SEQ ID NO: 4656 - DNA, 17 bp, Artificial Sequence
  Synthetic
aaautcaagtcttguuc

SEQ ID NO: 4657 - DNA, 17 bp, Artificial Sequence
  Synthetic
uaaattcaagtcttguu

SEQ ID NO: 4658 - DNA, 17 bp, Artificial Sequence
  Synthetic
guaaattcaagtctugu

SEQ ID NO: 4659 - DNA, 17 bp, Artificial Sequence
  Synthetic
gguaaattcaagtcuug

SEQ ID NO: 4660 - DNA, 17 bp, Artificial Sequence
  Synthetic
ugguaaattcaagtcuu

SEQ ID NO: 4661 - DNA, 17 bp, Artificial Sequence
  Synthetic
auggtaaattcaagucu

SEQ ID NO: 4662 - DNA, 17 bp, Artificial Sequence
  Synthetic
cauggtaaattcaaguc

SEQ ID NO: 4663 - DNA, 17 bp, Artificial Sequence
  Synthetic
ucauggtaaattcaagu

SEQ ID NO: 4664 - DNA, 17 bp, Artificial Sequence
  Synthetic
aucatggtaaattcaag

SEQ ID NO: 4665 - DNA, 17 bp, Artificial Sequence
  Synthetic
uaucatggtaaattcaa

SEQ ID NO: 4666 - DNA, 17 bp, Artificial Sequence
  Synthetic
auaucatggtaaatuca

SEQ ID NO: 4667 - DNA, 17 bp, Artificial Sequence
  Synthetic
aauatcatggtaaauuc

SEQ ID NO: 4668 - DNA, 17 bp, Artificial Sequence
  Synthetic
uaauatcatggtaaauu

SEQ ID NO: 4669 - DNA, 17 bp, Artificial Sequence
  Synthetic
auaatatcatggtaaau

SEQ ID NO: 4670 - DNA, 17 bp, Artificial Sequence
  Synthetic
aauaatatcatggtaaa

SEQ ID NO: 4671 - DNA, 17 bp, Artificial Sequence
  Synthetic
aaauaatatcatgguaa

SEQ ID NO: 4672 - DNA, 17 bp, Artificial Sequence
  Synthetic
uaaataatatcatggua

SEQ ID NO: 4673 - DNA, 17 bp, Artificial Sequence
  Synthetic
auaaataatatcatggu

SEQ ID NO: 4674 - DNA, 17 bp, Artificial Sequence
  Synthetic
gauaaataatatcaugg

SEQ ID NO: 4675 - DNA, 17 bp, Artificial Sequence
  Synthetic
ugauaaataatatcaug

SEQ ID NO: 4676 - DNA, 17 bp, Artificial Sequence
  Synthetic
gugataaataatatcau

SEQ ID NO: 4677 - DNA, 17 bp, Artificial Sequence
  Synthetic
ugugataaataatauca

SEQ ID NO: 4678 - DNA, 17 bp, Artificial Sequence
  Synthetic
cugugataaataatauc

SEQ ID NO: 4679 - DNA, 17 bp, Artificial Sequence
  Synthetic
ucugtgataaataauau

SEQ ID NO: 4680 - DNA, 17 bp, Artificial Sequence
  Synthetic
uucugtgataaataaua

SEQ ID NO: 4681 - DNA, 17 bp, Artificial Sequence
  Synthetic
uuuctgtgataaataau

SEQ ID NO: 4682 - DNA, 17 bp, Artificial Sequence
  Synthetic
auuuctgtgataaauaa

SEQ ID NO: 4683 - DNA, 17 bp, Artificial Sequence
  Synthetic
cauutctgtgataaaua

SEQ ID NO: 4684 - DNA, 17 bp, Artificial Sequence
  Synthetic
ucauttctgtgataaau

SEQ ID NO: 4685 - DNA, 17 bp, Artificial Sequence
  Synthetic
uucatttctgtgataaa

SEQ ID NO: 4686 - DNA, 17 bp, Artificial Sequence
  Synthetic
cuucatttctgtgauaa

SEQ ID NO: 4687 - DNA, 17 bp, Artificial Sequence
  Synthetic
acuucatttctgtgaua

SEQ ID NO: 4688 - DNA, 17 bp, Artificial Sequence
  Synthetic
cacutcatttctgtgau

SEQ ID NO: 4689 - DNA, 17 bp, Artificial Sequence
  Synthetic
ucacttcatttctguga

SEQ ID NO: 4690 - DNA, 17 bp, Artificial Sequence
  Synthetic
uucacttcatttctgug

SEQ ID NO: 4691 - DNA, 17 bp, Artificial Sequence
  Synthetic
uuucacttcatttcugu

SEQ ID NO: 4692 - DNA, 17 bp, Artificial Sequence
  Synthetic
guuucacttcatttcug

SEQ ID NO: 4693 - DNA, 17 bp, Artificial Sequence
  Synthetic
gguutcacttcattucu

SEQ ID NO: 4694 - DNA, 17 bp, Artificial Sequence
  Synthetic
ugguttcacttcatuuc

SEQ ID NO: 4695 - DNA, 17 bp, Artificial Sequence
  Synthetic
auggtttcacttcauuu

SEQ ID NO: 4696 - DNA, 17 bp, Artificial Sequence
  Synthetic
gauggtttcacttcauu

SEQ ID NO: 4697 - DNA, 17 bp, Artificial Sequence
  Synthetic
ugauggtttcacttcau

SEQ ID NO: 4698 - DNA, 17 bp, Artificial Sequence
  Synthetic
uugatggtttcactuca

SEQ ID NO: 4699 - DNA, 17 bp, Artificial Sequence
  Synthetic
uuugatggtttcacuuc

SEQ ID NO: 4700 - DNA, 17 bp, Artificial Sequence
  Synthetic
guuugatggtttcacuu

SEQ ID NO: 4701 - DNA, 17 bp, Artificial Sequence
  Synthetic
uguutgatggtttcacu

SEQ ID NO: 4702 - DNA, 17 bp, Artificial Sequence
  Synthetic
auguttgatggtttcac

SEQ ID NO: 4703 - DNA, 17 bp, Artificial Sequence
  Synthetic
caugtttgatggttuca

SEQ ID NO: 4704 - DNA, 17 bp, Artificial Sequence
  Synthetic
acaugtttgatggtuuc

SEQ ID NO: 4705 - DNA, 17 bp, Artificial Sequence
  Synthetic
aacatgtttgatgguuu

SEQ ID NO: 4706 - DNA, 17 bp, Artificial Sequence
  Synthetic
gaacatgtttgatgguu

SEQ ID NO: 4707 - DNA, 17 bp, Artificial Sequence
  Synthetic
ggaacatgtttgatggu

SEQ ID NO: 4708 - DNA, 17 bp, Artificial Sequence
  Synthetic
uggaacatgtttgaugg

SEQ ID NO: 4709 - DNA, 17 bp, Artificial Sequence
  Synthetic
uuggaacatgtttgaug

SEQ ID NO: 4710 - DNA, 17 bp, Artificial Sequence
  Synthetic
uuuggaacatgtttgau

SEQ ID NO: 4711 - DNA, 17 bp, Artificial Sequence
  Synthetic
uuuuggaacatgttuga

SEQ ID NO: 4712 - DNA, 17 bp, Artificial Sequence
  Synthetic
cuuutggaacatgtuug

SEQ ID NO: 4713 - DNA, 17 bp, Artificial Sequence
  Synthetic
acuuttggaacatguuu

SEQ ID NO: 4714 - DNA, 17 bp, Artificial Sequence
  Synthetic
uacutttggaacatguu

SEQ ID NO: 4715 - DNA, 17 bp, Artificial Sequence
  Synthetic
guacttttggaacaugu

SEQ ID NO: 4716 - DNA, 17 bp, Artificial Sequence
  Synthetic
gguacttttggaacaug

SEQ ID NO: 4717 - DNA, 17 bp, Artificial Sequence
  Synthetic
ugguacttttggaacau

SEQ ID NO: 4718 - DNA, 17 bp, Artificial Sequence
  Synthetic
cuggtacttttggaaca

SEQ ID NO: 4719 - DNA, 17 bp, Artificial Sequence
  Synthetic
ucuggtacttttggaac

SEQ ID NO: 4720 - DNA, 17 bp, Artificial Sequence
  Synthetic
aucuggtacttttggaa

SEQ ID NO: 4721 - DNA, 17 bp, Artificial Sequence
  Synthetic
cauctggtacttttgga

SEQ ID NO: 4722 - DNA, 17 bp, Artificial Sequence
  Synthetic
ccauctggtactttugg

SEQ ID NO: 4723 - DNA, 17 bp, Artificial Sequence
  Synthetic
gccatctggtacttuug

SEQ ID NO: 4724 - DNA, 17 bp, Artificial Sequence
  Synthetic
agccatctggtactuuu

SEQ ID NO: 4725 - DNA, 17 bp, Artificial Sequence
  Synthetic
aagccatctggtacuuu

SEQ ID NO: 4726 - DNA, 17 bp, Artificial Sequence
  Synthetic
uaagccatctggtacuu

SEQ ID NO: 4727 - DNA, 17 bp, Artificial Sequence
  Synthetic
uuaagccatctggtacu

SEQ ID NO: 4728 - DNA, 17 bp, Artificial Sequence
  Synthetic
uuuaagccatctgguac

SEQ ID NO: 4729 - DNA, 17 bp, Artificial Sequence
  Synthetic
auuuaagccatctggua

SEQ ID NO: 4730 - DNA, 17 bp, Artificial Sequence
  Synthetic
uauutaagccatctggu

SEQ ID NO: 4731 - DNA, 17 bp, Artificial Sequence
  Synthetic
uuauttaagccatcugg

SEQ ID NO: 4732 - DNA, 17 bp, Artificial Sequence
  Synthetic
auuatttaagccatcug

SEQ ID NO: 4733 - DNA, 17 bp, Artificial Sequence
  Synthetic
uauuatttaagccaucu

SEQ ID NO: 4734 - DNA, 17 bp, Artificial Sequence
  Synthetic
cuautatttaagccauc

SEQ ID NO: 4735 - DNA, 17 bp, Artificial Sequence
  Synthetic
acuattatttaagccau

SEQ ID NO: 4736 - DNA, 17 bp, Artificial Sequence
  Synthetic
gacuattatttaagcca

SEQ ID NO: 4737 - DNA, 17 bp, Artificial Sequence
  Synthetic
agactattatttaagcc

SEQ ID NO: 4738 - DNA, 17 bp, Artificial Sequence
  Synthetic
cagactattatttaagc

SEQ ID NO: 4739 - DNA, 17 bp, Artificial Sequence
  Synthetic
ccagactattatttaag

SEQ ID NO: 4740 - DNA, 17 bp, Artificial Sequence
  Synthetic
gccagactattattuaa

SEQ ID NO: 4741 - DNA, 17 bp, Artificial Sequence
  Synthetic
agccagactattatuua

SEQ ID NO: 4742 - DNA, 17 bp, Artificial Sequence
  Synthetic
aagccagactattauuu

SEQ ID NO: 4743 - DNA, 17 bp, Artificial Sequence
  Synthetic
caagccagactattauu

SEQ ID NO: 4744 - DNA, 17 bp, Artificial Sequence
  Synthetic
ccaagccagactatuau

SEQ ID NO: 4745 - DNA, 17 bp, Artificial Sequence
  Synthetic
gccaagccagactauua

SEQ ID NO: 4746 - DNA, 17 bp, Artificial Sequence
  Synthetic
ugccaagccagactauu

SEQ ID NO: 4747 - RNA, 17 nt, Artificial Sequence
  Synthetic
gugccaagccagacuau

SEQ ID NO: 4748 - RNA, 17 nt, Artificial Sequence
  Synthetic
ugugccaagccagacua

SEQ ID NO: 4749 - RNA, 17 nt, Artificial Sequence
  Synthetic
uugugccaagccagacu

SEQ ID NO: 4750 - DNA, 17 bp, Artificial Sequence
  Synthetic
guugtgccaagccagac

SEQ ID NO: 4751 - DNA, 17 bp, Artificial Sequence
  Synthetic
cguugtgccaagccaga

SEQ ID NO: 4752 - DNA, 17 bp, Artificial Sequence
  Synthetic
ucgutgtgccaagccag

SEQ ID NO: 4753 - DNA, 17 bp, Artificial Sequence
  Synthetic
aucgttgtgccaagcca

SEQ ID NO: 4754 - DNA, 17 bp, Artificial Sequence
  Synthetic
caucgttgtgccaagcc

SEQ ID NO: 4755 - DNA, 17 bp, Artificial Sequence
  Synthetic
acaucgttgtgccaagc

SEQ ID NO: 4756 - DNA, 17 bp, Artificial Sequence
  Synthetic
aacatcgttgtgccaag

SEQ ID NO: 4757 - DNA, 17 bp, Artificial Sequence
  Synthetic
aaacatcgttgtgccaa

SEQ ID NO: 4758 - DNA, 17 bp, Artificial Sequence
  Synthetic
aaaacatcgttgtgcca

SEQ ID NO: 4759 - DNA, 17 bp, Artificial Sequence
  Synthetic
aaaaacatcgttgtgcc

SEQ ID NO: 4760 - DNA, 17 bp, Artificial Sequence
  Synthetic
aaaaaacatcgttgugc

SEQ ID NO: 4761 - DNA, 17 bp, Artificial Sequence
  Synthetic
aaaaaaacatcgttgug

SEQ ID NO: 4762 - DNA, 17 bp, Artificial Sequence
  Synthetic
aaaaaaaacatcgtugu

SEQ ID NO: 4763 - DNA, 17 bp, Artificial Sequence
  Synthetic
gaaaaaaaacatcguug

SEQ ID NO: 4764 - DNA, 17 bp, Artificial Sequence
  Synthetic
agaaaaaaaacatcguu

SEQ ID NO: 4765 - DNA, 17 bp, Artificial Sequence
  Synthetic
aagaaaaaaaacatcgu

SEQ ID NO: 4766 - RNA, 17 nt, Artificial Sequence
  Synthetic
aaagaaaaaaaacaucg

SEQ ID NO: 4767 - RNA, 17 nt, Artificial Sequence
  Synthetic
caaagaaaaaaaacauc

SEQ ID NO: 4768 - RNA, 17 nt, Artificial Sequence
  Synthetic
ucaaagaaaaaaaacau

SEQ ID NO: 4769 - RNA, 17 nt, Artificial Sequence
  Synthetic
cucaaagaaaaaaaaca

SEQ ID NO: 4770 - RNA, 17 nt, Artificial Sequence
  Synthetic
ucucaaagaaaaaaaac

SEQ ID NO: 4771 - RNA, 17 nt, Artificial Sequence
  Synthetic
gucucaaagaaaaaaaa

SEQ ID NO: 4772 - DNA, 17 bp, Artificial Sequence
  Synthetic
uguctcaaagaaaaaaa

SEQ ID NO: 4773 - DNA, 17 bp, Artificial Sequence
  Synthetic
cuguctcaaagaaaaaa

SEQ ID NO: 4774 - DNA, 17 bp, Artificial Sequence
  Synthetic
ucugtctcaaagaaaaa

SEQ ID NO: 4775 - DNA, 17 bp, Artificial Sequence
  Synthetic
cucugtctcaaagaaaa

SEQ ID NO: 4776 - DNA, 17 bp, Artificial Sequence
  Synthetic
acuctgtctcaaagaaa

SEQ ID NO: 4777 - DNA, 17 bp, Artificial Sequence
  Synthetic
gacuctgtctcaaagaa

SEQ ID NO: 4778 - DNA, 17 bp, Artificial Sequence
  Synthetic
agactctgtctcaaaga

SEQ ID NO: 4779 - DNA, 17 bp, Artificial Sequence
  Synthetic
gagactctgtctcaaag

SEQ ID NO: 4780 - DNA, 17 bp, Artificial Sequence
  Synthetic
agagactctgtctcaaa

SEQ ID NO: 4781 - DNA, 17 bp, Artificial Sequence
  Synthetic
cagagactctgtctcaa

SEQ ID NO: 4782 - DNA, 17 bp, Artificial Sequence
  Synthetic
acagagactctgtcuca

SEQ ID NO: 4783 - DNA, 17 bp, Artificial Sequence
  Synthetic
aacagagactctgtcuc

SEQ ID NO: 4784 - DNA, 17 bp, Artificial Sequence
  Synthetic
caacagagactctgucu

SEQ ID NO: 4785 - DNA, 17 bp, Artificial Sequence
  Synthetic
gcaacagagactctguc

SEQ ID NO: 4786 - DNA, 17 bp, Artificial Sequence
  Synthetic
agcaacagagactcugu

SEQ ID NO: 4787 - DNA, 17 bp, Artificial Sequence
  Synthetic
aagcaacagagactcug

SEQ ID NO: 4788 - RNA, 17 nt, Artificial Sequence
  Synthetic
caagcaacagagacucu

SEQ ID NO: 4789 - RNA, 17 nt, Artificial Sequence
  Synthetic
ccaagcaacagagacuc

SEQ ID NO: 4790 - RNA, 17 nt, Artificial Sequence
  Synthetic
cccaagcaacagagacu

SEQ ID NO: 4791 - DNA, 17 bp, Artificial Sequence
  Synthetic
gcccaagcaacagagac

SEQ ID NO: 4792 - DNA, 17 bp, Artificial Sequence
  Synthetic
agcccaagcaacagaga

SEQ ID NO: 4793 - DNA, 17 bp, Artificial Sequence
  Synthetic
cagcccaagcaacagag

SEQ ID NO: 4794 - DNA, 17 bp, Artificial Sequence
  Synthetic
gcagcccaagcaacaga

SEQ ID NO: 4795 - RNA, 17 nt, Artificial Sequence
  Synthetic
ugcagcccaagcaacag

SEQ ID NO: 4796 - RNA, 17 nt, Artificial Sequence
  Synthetic
uugcagcccaagcaaca

SEQ ID NO: 4797 - RNA, 17 nt, Artificial Sequence
  Synthetic
auugcagcccaagcaac

SEQ ID NO: 4798 - RNA, 17 nt, Artificial Sequence
  Synthetic
cauugcagcccaagcaa

SEQ ID NO: 4799 - DNA, 17 bp, Artificial Sequence
  Synthetic
gcautgcagcccaagca

SEQ ID NO: 4800 - DNA, 17 bp, Artificial Sequence
  Synthetic
ugcattgcagcccaagc

SEQ ID NO: 4801 - DNA, 17 bp, Artificial Sequence
  Synthetic
cugcattgcagcccaag

SEQ ID NO: 4802 - DNA, 17 bp, Artificial Sequence
  Synthetic
acugcattgcagcccaa

SEQ ID NO: 4803 - DNA, 17 bp, Artificial Sequence
  Synthetic
cacugcattgcagccca

SEQ ID NO: 4804 - DNA, 17 bp, Artificial Sequence
  Synthetic
ucactgcattgcagccc

SEQ ID NO: 4805 - DNA, 17 bp, Artificial Sequence
  Synthetic
aucactgcattgcagcc

SEQ ID NO: 4806 - DNA, 17 bp, Artificial Sequence
  Synthetic
caucactgcattgcagc

SEQ ID NO: 4807 - DNA, 17 bp, Artificial Sequence
  Synthetic
gcaucactgcattgcag

SEQ ID NO: 4808 - DNA, 17 bp, Artificial Sequence
  Synthetic
ugcatcactgcattgca

SEQ ID NO: 4809 - DNA, 17 bp, Artificial Sequence
  Synthetic
uugcatcactgcatugc

SEQ ID NO: 4810 - DNA, 17 bp, Artificial Sequence
  Synthetic
auugcatcactgcauug

SEQ ID NO: 4811 - DNA, 17 bp, Artificial Sequence
  Synthetic
gauugcatcactgcauu

SEQ ID NO: 4812 - DNA, 17 bp, Artificial Sequence
  Synthetic
agautgcatcactgcau

SEQ ID NO: 4813 - DNA, 17 bp, Artificial Sequence
  Synthetic
aagattgcatcactgca

SEQ ID NO: 4814 - DNA, 17 bp, Artificial Sequence
  Synthetic
caagattgcatcacugc

SEQ ID NO: 4815 - DNA, 17 bp, Artificial Sequence
  Synthetic
ccaagattgcatcacug

SEQ ID NO: 4816 - DNA, 17 bp, Artificial Sequence
  Synthetic
gccaagattgcatcacu

SEQ ID NO: 4817 - DNA, 17 bp, Artificial Sequence
  Synthetic
agccaagattgcatcac

SEQ ID NO: 4818 - DNA, 17 bp, Artificial Sequence
  Synthetic
gagccaagattgcauca

SEQ ID NO: 4819 - DNA, 17 bp, Artificial Sequence
  Synthetic
ugagccaagattgcauc

SEQ ID NO: 4820 - DNA, 17 bp, Artificial Sequence
  Synthetic
gugagccaagattgcau

SEQ ID NO: 4821 - DNA, 17 bp, Artificial Sequence
  Synthetic
agugagccaagattgca

SEQ ID NO: 4822 - DNA, 17 bp, Artificial Sequence
  Synthetic
cagugagccaagatugc

SEQ ID NO: 4823 - DNA, 17 bp, Artificial Sequence
  Synthetic
gcagtgagccaagauug

SEQ ID NO: 4824 - DNA, 17 bp, Artificial Sequence
  Synthetic
ugcagtgagccaagauu

SEQ ID NO: 4825 - DNA, 17 bp, Artificial Sequence
  Synthetic
uugcagtgagccaagau

SEQ ID NO: 4826 - DNA, 17 bp, Artificial Sequence
  Synthetic
guugcagtgagccaaga

SEQ ID NO: 4827 - DNA, 17 bp, Artificial Sequence
  Synthetic
gguugcagtgagccaag

SEQ ID NO: 4828 - DNA, 17 bp, Artificial Sequence
  Synthetic
aggutgcagtgagccaa

SEQ ID NO: 4829 - DNA, 17 bp, Artificial Sequence
  Synthetic
gaggttgcagtgagcca

SEQ ID NO: 4830 - DNA, 17 bp, Artificial Sequence
  Synthetic
ggaggttgcagtgagcc

SEQ ID NO: 4831 - DNA, 17 bp, Artificial Sequence
  Synthetic
cggaggttgcagtgagc

SEQ ID NO: 4832 - DNA, 17 bp, Artificial Sequence
  Synthetic
gcggaggttgcagtgag

SEQ ID NO: 4833 - DNA, 17 bp, Artificial Sequence
  Synthetic
ggcggaggttgcaguga

SEQ ID NO: 4834 - DNA, 17 bp, Artificial Sequence
  Synthetic
aggcggaggttgcagug

SEQ ID NO: 4835 - DNA, 17 bp, Artificial Sequence
  Synthetic
gaggcggaggttgcagu

SEQ ID NO: 4836 - DNA, 17 bp, Artificial Sequence
  Synthetic
ggaggcggaggttgcag

SEQ ID NO: 4837 - DNA, 17 bp, Artificial Sequence
  Synthetic
aggaggcggaggttgca

SEQ ID NO: 4838 - DNA, 17 bp, Artificial Sequence
  Synthetic
caggaggcggaggtugc

SEQ ID NO: 4839 - RNA, 17 nt, Artificial Sequence
  Synthetic
ccaggaggcggagguug

SEQ ID NO: 4840 - RNA, 17 nt, Artificial Sequence
  Synthetic
cccaggaggcggagguu

SEQ ID NO: 4841 - RNA, 17 nt, Artificial Sequence
  Synthetic
acccaggaggcggaggu

SEQ ID NO: 4842 - DNA, 17 bp, Artificial Sequence
  Synthetic
aacccaggaggcggagg

SEQ ID NO: 4843 - DNA, 17 bp, Artificial Sequence
  Synthetic
gaacccaggaggcggag

SEQ ID NO: 4844 - RNA, 17 nt, Artificial Sequence
  Synthetic
ugaacccaggaggcgga

SEQ ID NO: 4845 - RNA, 17 nt, Artificial Sequence
  Synthetic
uugaacccaggaggcgg

SEQ ID NO: 4846 - RNA, 17 nt, Artificial Sequence
  Synthetic
cuugaacccaggaggcg

SEQ ID NO: 4847 - RNA, 17 nt, Artificial Sequence
  Synthetic
acuugaacccaggaggc

SEQ ID NO: 4848 - DNA, 17 bp, Artificial Sequence
  Synthetic
cacutgaacccaggagg

SEQ ID NO: 4849 - DNA, 17 bp, Artificial Sequence
  Synthetic
ucacttgaacccaggag

SEQ ID NO: 4850 - DNA, 17 bp, Artificial Sequence
  Synthetic
aucacttgaacccagga

SEQ ID NO: 4851 - DNA, 17 bp, Artificial Sequence
  Synthetic
aaucacttgaacccagg

SEQ ID NO: 4852 - DNA, 17 bp, Artificial Sequence
  Synthetic
gaaucacttgaacccag

SEQ ID NO: 4853 - DNA, 17 bp, Artificial Sequence
  Synthetic
agaatcacttgaaccca

SEQ ID NO: 4854 - DNA, 17 bp, Artificial Sequence
  Synthetic
gagaatcacttgaaccc

SEQ ID NO: 4855 - DNA, 17 bp, Artificial Sequence
  Synthetic
cgagaatcacttgaacc

SEQ ID NO: 4856 - DNA, 17 bp, Artificial Sequence
  Synthetic
acgagaatcacttgaac

SEQ ID NO: 4857 - DNA, 17 bp, Artificial Sequence
  Synthetic
cacgagaatcacttgaa

SEQ ID NO: 4858 - DNA, 17 bp, Artificial Sequence
  Synthetic
gcacgagaatcactuga

SEQ ID NO: 4859 - DNA, 17 bp, Artificial Sequence
  Synthetic
agcacgagaatcacuug

SEQ ID NO: 4860 - DNA, 17 bp, Artificial Sequence
  Synthetic
aagcacgagaatcacuu

SEQ ID NO: 4861 - DNA, 17 bp, Artificial Sequence
  Synthetic
gaagcacgagaatcacu

SEQ ID NO: 4862 - DNA, 17 bp, Artificial Sequence
  Synthetic
ugaagcacgagaatcac

SEQ ID NO: 4863 - RNA, 17 nt, Artificial Sequence
  Synthetic
cugaagcacgagaauca

SEQ ID NO: 4864 - RNA, 17 nt, Artificial Sequence
  Synthetic
gcugaagcacgagaauc

SEQ ID NO: 4865 - RNA, 17 nt, Artificial Sequence
  Synthetic
ggcugaagcacgagaau

SEQ ID NO: 4866 - DNA, 17 bp, Artificial Sequence
  Synthetic
aggctgaagcacgagaa

SEQ ID NO: 4867 - DNA, 17 bp, Artificial Sequence
  Synthetic
gaggctgaagcacgaga

SEQ ID NO: 4868 - DNA, 17 bp, Artificial Sequence
  Synthetic
ggaggctgaagcacgag

SEQ ID NO: 4869 - DNA, 17 bp, Artificial Sequence
  Synthetic
gggaggctgaagcacga

SEQ ID NO: 4870 - DNA, 17 bp, Artificial Sequence
  Synthetic
ugggaggctgaagcacg

SEQ ID NO: 4871 - DNA, 17 bp, Artificial Sequence
  Synthetic
uugggaggctgaagcac

SEQ ID NO: 4872 - DNA, 17 bp, Artificial Sequence
  Synthetic
cuugggaggctgaagca

SEQ ID NO: 4873 - DNA, 17 bp, Artificial Sequence
  Synthetic
acuugggaggctgaagc

SEQ ID NO: 4874 - DNA, 17 bp, Artificial Sequence
  Synthetic
uacutgggaggctgaag

SEQ ID NO: 4875 - DNA, 17 bp, Artificial Sequence
  Synthetic
guacttgggaggctgaa

SEQ ID NO: 4876 - DNA, 17 bp, Artificial Sequence
  Synthetic
gguacttgggaggcuga

SEQ ID NO: 4877 - DNA, 17 bp, Artificial Sequence
  Synthetic
agguacttgggaggcug

SEQ ID NO: 4878 - DNA, 17 bp, Artificial Sequence
  Synthetic
caggtacttgggaggcu

SEQ ID NO: 4879 - DNA, 17 bp, Artificial Sequence
  Synthetic
ccaggtacttgggaggc

SEQ ID NO: 4880 - DNA, 17 bp, Artificial Sequence
  Synthetic
cccaggtacttgggagg

SEQ ID NO: 4881 - DNA, 17 bp, Artificial Sequence
  Synthetic
ucccaggtacttgggag

SEQ ID NO: 4882 - DNA, 17 bp, Artificial Sequence
  Synthetic
gucccaggtacttggga

SEQ ID NO: 4883 - DNA, 17 bp, Artificial Sequence
  Synthetic
agucccaggtacttggg

SEQ ID NO: 4884 - DNA, 17 bp, Artificial Sequence
  Synthetic
uagucccaggtactugg

SEQ ID NO: 4885 - DNA, 17 bp, Artificial Sequence
  Synthetic
guagtcccaggtacuug

SEQ ID NO: 4886 - DNA, 17 bp, Artificial Sequence
  Synthetic
uguagtcccaggtacuu

SEQ ID NO: 4887 - DNA, 17 bp, Artificial Sequence
  Synthetic
cuguagtcccaggtacu

SEQ ID NO: 4888 - DNA, 17 bp, Artificial Sequence
  Synthetic
ccugtagtcccagguac

SEQ ID NO: 4889 - DNA, 17 bp, Artificial Sequence
  Synthetic
accugtagtcccaggua

SEQ ID NO: 4890 - DNA, 17 bp, Artificial Sequence
  Synthetic
cacctgtagtcccaggu

SEQ ID NO: 4891 - DNA, 17 bp, Artificial Sequence
  Synthetic
acacctgtagtcccagg

SEQ ID NO: 4892 - DNA, 17 bp, Artificial Sequence
  Synthetic
cacacctgtagtcccag

SEQ ID NO: 4893 - DNA, 17 bp, Artificial Sequence
  Synthetic
gcacacctgtagtccca

SEQ ID NO: 4894 - DNA, 17 bp, Artificial Sequence
  Synthetic
ugcacacctgtagtccc

SEQ ID NO: 4895 - DNA, 17 bp, Artificial Sequence
  Synthetic
gugcacacctgtagucc

SEQ ID NO: 4896 - DNA, 17 bp, Artificial Sequence
  Synthetic
ggugcacacctgtaguc

SEQ ID NO: 4897 - DNA, 17 bp, Artificial Sequence
  Synthetic
uggugcacacctgtagu

SEQ ID NO: 4898 - DNA, 17 bp, Artificial Sequence
  Synthetic
guggtgcacacctguag

SEQ ID NO: 4899 - DNA, 17 bp, Artificial Sequence
  Synthetic
gguggtgcacacctgua

SEQ ID NO: 4900 - DNA, 17 bp, Artificial Sequence
  Synthetic
ugguggtgcacaccugu

SEQ ID NO: 4901 - DNA, 17 bp, Artificial Sequence
  Synthetic
guggtggtgcacaccug

SEQ ID NO: 4902 - DNA, 17 bp, Artificial Sequence
  Synthetic
uguggtggtgcacaccu

SEQ ID NO: 4903 - DNA, 17 bp, Artificial Sequence
  Synthetic
guguggtggtgcacacc

SEQ ID NO: 4904 - DNA, 17 bp, Artificial Sequence
  Synthetic
ggugtggtggtgcacac

SEQ ID NO: 4905 - DNA, 17 bp, Artificial Sequence
  Synthetic
uggugtggtggtgcaca

SEQ ID NO: 4906 - DNA, 17 bp, Artificial Sequence
  Synthetic
cuggtgtggtggtgcac

SEQ ID NO: 4907 - DNA, 17 bp, Artificial Sequence
  Synthetic
ccuggtgtggtggtgca

SEQ ID NO: 4908 - DNA, 17 bp, Artificial Sequence
  Synthetic
gccuggtgtggtggugc

SEQ ID NO: 4909 - DNA, 17 bp, Artificial Sequence
  Synthetic
agcctggtgtggtggug

SEQ ID NO: 4910 - DNA, 17 bp, Artificial Sequence
  Synthetic
uagcctggtgtggtggu

SEQ ID NO: 4911 - DNA, 17 bp, Artificial Sequence
  Synthetic
uuagcctggtgtggugg

SEQ ID NO: 4912 - DNA, 17 bp, Artificial Sequence
  Synthetic
auuagcctggtgtggug

SEQ ID NO: 4913 - DNA, 17 bp, Artificial Sequence
  Synthetic
aauuagcctggtgtggu

SEQ ID NO: 4914 - DNA, 17 bp, Artificial Sequence
  Synthetic
aaautagcctggtgugg

SEQ ID NO: 4915 - DNA, 17 bp, Artificial Sequence
  Synthetic
aaaattagcctggtgug

SEQ ID NO: 4916 - DNA, 17 bp, Artificial Sequence
  Synthetic
aaaaattagcctggugu

SEQ ID NO: 4917 - DNA, 17 bp, Artificial Sequence
  Synthetic
aaaaaattagcctggug

SEQ ID NO: 4918 - DNA, 17 bp, Artificial Sequence
  Synthetic
caaaaaattagcctggu

SEQ ID NO: 4919 - DNA, 17 bp, Artificial Sequence
  Synthetic
acaaaaaattagccugg

SEQ ID NO: 4920 - DNA, 17 bp, Artificial Sequence
  Synthetic
cacaaaaaattagccug

SEQ ID NO: 4921 - DNA, 17 bp, Artificial Sequence
  Synthetic
acacaaaaaattagccu

SEQ ID NO: 4922 - DNA, 17 bp, Artificial Sequence
  Synthetic
uacacaaaaaattagcc

SEQ ID NO: 4923 - DNA, 17 bp, Artificial Sequence
  Synthetic
auacacaaaaaattagc

SEQ ID NO: 4924 - DNA, 17 bp, Artificial Sequence
  Synthetic
aauacacaaaaaatuag

SEQ ID NO: 4925 - RNA, 17 nt, Artificial Sequence
  Synthetic
aaauacacaaaaaauua

SEQ ID NO: 4926 - DNA, 17 bp, Artificial Sequence
  Synthetic
aaaatacacaaaaaauu

SEQ ID NO: 4927 - DNA, 17 bp, Artificial Sequence
  Synthetic
aaaaatacacaaaaaau

SEQ ID NO: 4928 - DNA, 17 bp, Artificial Sequence
  Synthetic
uaaaaatacacaaaaaa

SEQ ID NO: 4929 - DNA, 17 bp, Artificial Sequence
  Synthetic
guaaaaatacacaaaaa

SEQ ID NO: 4930 - DNA, 17 bp, Artificial Sequence
  Synthetic
aguaaaaatacacaaaa

SEQ ID NO: 4931 - DNA, 17 bp, Artificial Sequence
  Synthetic
uaguaaaaatacacaaa

SEQ ID NO: 4932 - DNA, 17 bp, Artificial Sequence
  Synthetic
cuagtaaaaatacacaa

SEQ ID NO: 4933 - DNA, 17 bp, Artificial Sequence
  Synthetic
ucuagtaaaaatacaca

SEQ ID NO: 4934 - DNA, 17 bp, Artificial Sequence
  Synthetic
cucuagtaaaaatacac

SEQ ID NO: 4935 - DNA, 17 bp, Artificial Sequence
  Synthetic
ucuctagtaaaaataca

SEQ ID NO: 4936 - DNA, 17 bp, Artificial Sequence
  Synthetic
gucuctagtaaaaauac

SEQ ID NO: 4937 - DNA, 17 bp, Artificial Sequence
  Synthetic
uguctctagtaaaaaua

SEQ ID NO: 4938 - DNA, 17 bp, Artificial Sequence
  Synthetic
cuguctctagtaaaaau

SEQ ID NO: 4939 - DNA, 17 bp, Artificial Sequence
  Synthetic
ccugtctctagtaaaaa

SEQ ID NO: 4940 - DNA, 17 bp, Artificial Sequence
  Synthetic
cccugtctctagtaaaa

SEQ ID NO: 4941 - DNA, 17 bp, Artificial Sequence
  Synthetic
accctgtctctagtaaa

SEQ ID NO: 4942 - DNA, 17 bp, Artificial Sequence
  Synthetic
aaccctgtctctaguaa

SEQ ID NO: 4943 - DNA, 17 bp, Artificial Sequence
  Synthetic
aaaccctgtctctagua

SEQ ID NO: 4944 - DNA, 17 bp, Artificial Sequence
  Synthetic
gaaaccctgtctctagu

SEQ ID NO: 4945 - DNA, 17 bp, Artificial Sequence
  Synthetic
ugaaaccctgtctcuag

SEQ ID NO: 4946 - DNA, 17 bp, Artificial Sequence
  Synthetic
gugaaaccctgtctcua

SEQ ID NO: 4947 - DNA, 17 bp, Artificial Sequence
  Synthetic
ggugaaaccctgtcucu

SEQ ID NO: 4948 - DNA, 17 bp, Artificial Sequence
  Synthetic
uggugaaaccctgtcuc

SEQ ID NO: 4949 - DNA, 17 bp, Artificial Sequence
  Synthetic
auggtgaaaccctgucu

SEQ ID NO: 4950 - DNA, 17 bp, Artificial Sequence
  Synthetic
cauggtgaaaccctguc

SEQ ID NO: 4951 - DNA, 17 bp, Artificial Sequence
  Synthetic
acauggtgaaacccugu

SEQ ID NO: 4952 - DNA, 17 bp, Artificial Sequence
  Synthetic
aacatggtgaaacccug

SEQ ID NO: 4953 - DNA, 17 bp, Artificial Sequence
  Synthetic
caacatggtgaaacccu

SEQ ID NO: 4954 - DNA, 17 bp, Artificial Sequence
  Synthetic
ccaacatggtgaaaccc

SEQ ID NO: 4955 - DNA, 17 bp, Artificial Sequence
  Synthetic
gccaacatggtgaaacc

SEQ ID NO: 4956 - DNA, 17 bp, Artificial Sequence
  Synthetic
ggccaacatggtgaaac

SEQ ID NO: 4957 - DNA, 17 bp, Artificial Sequence
  Synthetic
uggccaacatggtgaaa

SEQ ID NO: 4958 - DNA, 17 bp, Artificial Sequence
  Synthetic
cuggccaacatggtgaa

SEQ ID NO: 4959 - DNA, 17 bp, Artificial Sequence
  Synthetic
gcuggccaacatgguga

SEQ ID NO: 4960 - DNA, 17 bp, Artificial Sequence
  Synthetic
ugcuggccaacatggug

SEQ ID NO: 4961 - DNA, 17 bp, Artificial Sequence
  Synthetic
augctggccaacatggu

SEQ ID NO: 4962 - DNA, 17 bp, Artificial Sequence
  Synthetic
caugctggccaacaugg

SEQ ID NO: 4963 - DNA, 17 bp, Artificial Sequence
  Synthetic
ccaugctggccaacaug

SEQ ID NO: 4964 - DNA, 17 bp, Artificial Sequence
  Synthetic
accatgctggccaacau

SEQ ID NO: 4965 - DNA, 17 bp, Artificial Sequence
  Synthetic
gaccatgctggccaaca

SEQ ID NO: 4966 - DNA, 17 bp, Artificial Sequence
  Synthetic
agaccatgctggccaac

SEQ ID NO: 4967 - DNA, 17 bp, Artificial Sequence
  Synthetic
aagaccatgctggccaa

SEQ ID NO: 4968 - DNA, 17 bp, Artificial Sequence
  Synthetic
caagaccatgctggcca

SEQ ID NO: 4969 - DNA, 17 bp, Artificial Sequence
  Synthetic
ucaagaccatgctggcc

SEQ ID NO: 4970 - DNA, 17 bp, Artificial Sequence
  Synthetic
uucaagaccatgctggc

SEQ ID NO: 4971 - DNA, 17 bp, Artificial Sequence
  Synthetic
guucaagaccatgcugg

SEQ ID NO: 4972 - DNA, 17 bp, Artificial Sequence
  Synthetic
cguucaagaccatgcug

SEQ ID NO: 4973 - DNA, 17 bp, Artificial Sequence
  Synthetic
gcgutcaagaccatgcu

SEQ ID NO: 4974 - DNA, 17 bp, Artificial Sequence
  Synthetic
ggcgttcaagaccaugc

SEQ ID NO: 4975 - DNA, 17 bp, Artificial Sequence
  Synthetic
aggcgttcaagaccaug

SEQ ID NO: 4976 - DNA, 17 bp, Artificial Sequence
  Synthetic
caggcgttcaagaccau

SEQ ID NO: 4977 - DNA, 17 bp, Artificial Sequence
  Synthetic
ucaggcgttcaagacca

SEQ ID NO: 4978 - DNA, 17 bp, Artificial Sequence
  Synthetic
gucaggcgttcaagacc

SEQ ID NO: 4979 - DNA, 17 bp, Artificial Sequence
  Synthetic
ggucaggcgttcaagac

SEQ ID NO: 4980 - DNA, 17 bp, Artificial Sequence
  Synthetic
aggucaggcgttcaaga

SEQ ID NO: 4981 - DNA, 17 bp, Artificial Sequence
  Synthetic
gaggtcaggcgttcaag

SEQ ID NO: 4982 - DNA, 17 bp, Artificial Sequence
  Synthetic
ugaggtcaggcgttcaa

SEQ ID NO: 4983 - DNA, 17 bp, Artificial Sequence
  Synthetic
cugaggtcaggcgtuca

SEQ ID NO: 4984 - DNA, 17 bp, Artificial Sequence
  Synthetic
ucugaggtcaggcguuc

SEQ ID NO: 4985 - DNA, 17 bp, Artificial Sequence
  Synthetic
aucugaggtcaggcguu

SEQ ID NO: 4986 - DNA, 17 bp, Artificial Sequence
  Synthetic
cauctgaggtcaggcgu

SEQ ID NO: 4987 - DNA, 17 bp, Artificial Sequence
  Synthetic
ucauctgaggtcaggcg

SEQ ID NO: 4988 - DNA, 17 bp, Artificial Sequence
  Synthetic
aucatctgaggtcaggc

SEQ ID NO: 4989 - DNA, 17 bp, Artificial Sequence
  Synthetic
gaucatctgaggtcagg

SEQ ID NO: 4990 - DNA, 17 bp, Artificial Sequence
  Synthetic
ggaucatctgaggtcag

SEQ ID NO: 4991 - DNA, 17 bp, Artificial Sequence
  Synthetic
uggatcatctgagguca

SEQ ID NO: 4992 - DNA, 17 bp, Artificial Sequence
  Synthetic
guggatcatctgagguc

SEQ ID NO: 4993 - DNA, 17 bp, Artificial Sequence
  Synthetic
gguggatcatctgaggu

SEQ ID NO: 4994 - DNA, 17 bp, Artificial Sequence
  Synthetic
ggguggatcatctgagg

SEQ ID NO: 4995 - DNA, 17 bp, Artificial Sequence
  Synthetic
ugggtggatcatctgag

SEQ ID NO: 4996 - DNA, 17 bp, Artificial Sequence
  Synthetic
gugggtggatcatcuga

SEQ ID NO: 4997 - DNA, 17 bp, Artificial Sequence
  Synthetic
ggugggtggatcatcug

SEQ ID NO: 4998 - DNA, 17 bp, Artificial Sequence
  Synthetic
aggugggtggatcaucu

SEQ ID NO: 4999 - DNA, 17 bp, Artificial Sequence
  Synthetic
aaggtgggtggatcauc

SEQ ID NO: 5000 - DNA, 17 bp, Artificial Sequence
  Synthetic
caaggtgggtggatcau

SEQ ID NO: 5001 - DNA, 17 bp, Artificial Sequence
  Synthetic
ccaaggtgggtggauca

SEQ ID NO: 5002 - DNA, 17 bp, Artificial Sequence
  Synthetic
gccaaggtgggtggauc

SEQ ID NO: 5003 - DNA, 17 bp, Artificial Sequence
  Synthetic
ggccaaggtgggtggau

SEQ ID NO: 5004 - DNA, 17 bp, Artificial Sequence
  Synthetic
aggccaaggtgggtgga

SEQ ID NO: 5005 - DNA, 17 bp, Artificial Sequence
  Synthetic
gaggccaaggtgggugg

SEQ ID NO: 5006 - DNA, 17 bp, Artificial Sequence
  Synthetic
ggaggccaaggtgggug

SEQ ID NO: 5007 - DNA, 17 bp, Artificial Sequence
  Synthetic
gggaggccaaggtgggu

SEQ ID NO: 5008 - DNA, 17 bp, Artificial Sequence
  Synthetic
ugggaggccaaggtggg

SEQ ID NO: 5009 - RNA, 17 nt, Artificial Sequence
  Synthetic
uugggaggccaaggugg

SEQ ID NO: 5010 - RNA, 17 nt, Artificial Sequence
  Synthetic
uuugggaggccaaggug

SEQ ID NO: 5011 - RNA, 17 nt, Artificial Sequence
  Synthetic
cuuugggaggccaaggu

SEQ ID NO: 5012 - DNA, 17 bp, Artificial Sequence
  Synthetic
acuutgggaggccaagg

SEQ ID NO: 5013 - DNA, 17 bp, Artificial Sequence
  Synthetic
cacuttgggaggccaag

SEQ ID NO: 5014 - DNA, 17 bp, Artificial Sequence
  Synthetic
gcactttgggaggccaa

SEQ ID NO: 5015 - DNA, 17 bp, Artificial Sequence
  Synthetic
agcactttgggaggcca

SEQ ID NO: 5016 - DNA, 17 bp, Artificial Sequence
  Synthetic
cagcactttgggaggcc

SEQ ID NO: 5017 - DNA, 17 bp, Artificial Sequence
  Synthetic
ccagcactttgggaggc

SEQ ID NO: 5018 - DNA, 17 bp, Artificial Sequence
  Synthetic
cccagcactttgggagg

SEQ ID NO: 5019 - DNA, 17 bp, Artificial Sequence
  Synthetic
ucccagcactttgggag

SEQ ID NO: 5020 - DNA, 17 bp, Artificial Sequence
  Synthetic
aucccagcactttggga

SEQ ID NO: 5021 - DNA, 17 bp, Artificial Sequence
  Synthetic
aaucccagcactttggg

SEQ ID NO: 5022 - DNA, 17 bp, Artificial Sequence
  Synthetic
uaaucccagcacttugg

SEQ ID NO: 5023 - DNA, 17 bp, Artificial Sequence
  Synthetic
guaatcccagcactuug

SEQ ID NO: 5024 - DNA, 17 bp, Artificial Sequence
  Synthetic
uguaatcccagcacuuu

SEQ ID NO: 5025 - DNA, 17 bp, Artificial Sequence
  Synthetic
cuguaatcccagcacuu

SEQ ID NO: 5026 - DNA, 17 bp, Artificial Sequence
  Synthetic
ccugtaatcccagcacu

SEQ ID NO: 5027 - DNA, 17 bp, Artificial Sequence
  Synthetic
gccugtaatcccagcac

SEQ ID NO: 5028 - DNA, 17 bp, Artificial Sequence
  Synthetic
ugcctgtaatcccagca

SEQ ID NO: 5029 - DNA, 17 bp, Artificial Sequence
  Synthetic
augcctgtaatcccagc

SEQ ID NO: 5030 - DNA, 17 bp, Artificial Sequence
  Synthetic
caugcctgtaatcccag

SEQ ID NO: 5031 - DNA, 17 bp, Artificial Sequence
  Synthetic
ucaugcctgtaatccca

SEQ ID NO: 5032 - DNA, 17 bp, Artificial Sequence
  Synthetic
cucatgcctgtaatccc

SEQ ID NO: 5033 - DNA, 17 bp, Artificial Sequence
  Synthetic
gcucatgcctgtaaucc

SEQ ID NO: 5034 - DNA, 17 bp, Artificial Sequence
  Synthetic
ggcucatgcctgtaauc

SEQ ID NO: 5035 - DNA, 17 bp, Artificial Sequence
  Synthetic
uggctcatgcctgtaau

SEQ ID NO: 5036 - DNA, 17 bp, Artificial Sequence
  Synthetic
guggctcatgcctguaa

SEQ ID NO: 5037 - DNA, 17 bp, Artificial Sequence
  Synthetic
gguggctcatgcctgua

SEQ ID NO: 5038 - DNA, 17 bp, Artificial Sequence
  Synthetic
ugguggctcatgccugu

SEQ ID NO: 5039 - DNA, 17 bp, Artificial Sequence
  Synthetic
guggtggctcatgccug

SEQ ID NO: 5040 - DNA, 17 bp, Artificial Sequence
  Synthetic
cguggtggctcatgccu

SEQ ID NO: 5041 - DNA, 17 bp, Artificial Sequence
  Synthetic
ccguggtggctcatgcc

SEQ ID NO: 5042 - DNA, 17 bp, Artificial Sequence
  Synthetic
gccgtggtggctcaugc

SEQ ID NO: 5043 - DNA, 17 bp, Artificial Sequence
  Synthetic
ggccgtggtggctcaug

SEQ ID NO: 5044 - DNA, 17 bp, Artificial Sequence
  Synthetic
uggccgtggtggctcau

SEQ ID NO: 5045 - DNA, 17 bp, Artificial Sequence
  Synthetic
cuggccgtggtggcuca

SEQ ID NO: 5046 - DNA, 17 bp, Artificial Sequence
  Synthetic
gcuggccgtggtggcuc

SEQ ID NO: 5047 - DNA, 17 bp, Artificial Sequence
  Synthetic
ggcuggccgtggtggcu

SEQ ID NO: 5048 - DNA, 17 bp, Artificial Sequence
  Synthetic
gggctggccgtggtggc

SEQ ID NO: 5049 - DNA, 17 bp, Artificial Sequence
  Synthetic
ugggctggccgtggugg

SEQ ID NO: 5050 - DNA, 17 bp, Artificial Sequence
  Synthetic
gugggctggccgtggug

SEQ ID NO: 5051 - DNA, 17 bp, Artificial Sequence
  Synthetic
ugugggctggccgtggu

SEQ ID NO: 5052 - DNA, 17 bp, Artificial Sequence
  Synthetic
uugugggctggccgugg

SEQ ID NO: 5053 - DNA, 17 bp, Artificial Sequence
  Synthetic
auugtgggctggccgug

SEQ ID NO: 5054 - DNA, 17 bp, Artificial Sequence
  Synthetic
cauugtgggctggccgu

SEQ ID NO: 5055 - DNA, 17 bp, Artificial Sequence
  Synthetic
ucautgtgggctggccg

SEQ ID NO: 5056 - DNA, 17 bp, Artificial Sequence
  Synthetic
aucattgtgggctggcc

SEQ ID NO: 5057 - DNA, 17 bp, Artificial Sequence
  Synthetic
uaucattgtgggctggc

SEQ ID NO: 5058 - DNA, 17 bp, Artificial Sequence
  Synthetic
auaucattgtgggcugg

SEQ ID NO: 5059 - DNA, 17 bp, Artificial Sequence
  Synthetic
aauatcattgtgggcug

SEQ ID NO: 5060 - DNA, 17 bp, Artificial Sequence
  Synthetic
uaauatcattgtgggcu

SEQ ID NO: 5061 - DNA, 17 bp, Artificial Sequence
  Synthetic
guaatatcattgtgggc

SEQ ID NO: 5062 - DNA, 17 bp, Artificial Sequence
  Synthetic
uguaatatcattgtggg

SEQ ID NO: 5063 - DNA, 17 bp, Artificial Sequence
  Synthetic
uuguaatatcattgugg

SEQ ID NO: 5064 - DNA, 17 bp, Artificial Sequence
  Synthetic
uuugtaatatcattgug

SEQ ID NO: 5065 - DNA, 17 bp, Artificial Sequence
  Synthetic
guuugtaatatcatugu

SEQ ID NO: 5066 - DNA, 17 bp, Artificial Sequence
  Synthetic
gguutgtaatatcauug

SEQ ID NO: 5067 - DNA, 17 bp, Artificial Sequence
  Synthetic
agguttgtaatatcauu

SEQ ID NO: 5068 - DNA, 17 bp, Artificial Sequence
  Synthetic
uaggtttgtaatatcau

SEQ ID NO: 5069 - DNA, 17 bp, Artificial Sequence
  Synthetic
auaggtttgtaatauca

SEQ ID NO: 5070 - DNA, 17 bp, Artificial Sequence
  Synthetic
aauaggtttgtaatauc

SEQ ID NO: 5071 - DNA, 17 bp, Artificial Sequence
  Synthetic
uaauaggtttgtaauau

SEQ ID NO: 5072 - DNA, 17 bp, Artificial Sequence
  Synthetic
uuaataggtttgtaaua

SEQ ID NO: 5073 - DNA, 17 bp, Artificial Sequence
  Synthetic
uuuaataggtttgtaau

SEQ ID NO: 5074 - DNA, 17 bp, Artificial Sequence
  Synthetic
uuuuaataggtttguaa

SEQ ID NO: 5075 - DNA, 17 bp, Artificial Sequence
  Synthetic
uuuutaataggtttgua

SEQ ID NO: 5076 - DNA, 17 bp, Artificial Sequence
  Synthetic
auuuttaataggttugu

SEQ ID NO: 5077 - DNA, 17 bp, Artificial Sequence
  Synthetic
cauutttaataggtuug

SEQ ID NO: 5078 - DNA, 17 bp, Artificial Sequence
  Synthetic
ucauttttaatagguuu

SEQ ID NO: 5079 - DNA, 17 bp, Artificial Sequence
  Synthetic
aucatttttaatagguu

SEQ ID NO: 5080 - DNA, 17 bp, Artificial Sequence
  Synthetic
uaucatttttaataggu

SEQ ID NO: 5081 - DNA, 17 bp, Artificial Sequence
  Synthetic
guaucatttttaatagg

SEQ ID NO: 5082 - DNA, 17 bp, Artificial Sequence
  Synthetic
aguatcatttttaauag

SEQ ID NO: 5083 - DNA, 17 bp, Artificial Sequence
  Synthetic
aaguatcatttttaaua

SEQ ID NO: 5084 - DNA, 17 bp, Artificial Sequence
  Synthetic
uaagtatcatttttaau

SEQ ID NO: 5085 - DNA, 17 bp, Artificial Sequence
  Synthetic
cuaagtatcattttuaa

SEQ ID NO: 5086 - DNA, 17 bp, Artificial Sequence
  Synthetic
ucuaagtatcatttuua

SEQ ID NO: 5087 - DNA, 17 bp, Artificial Sequence
  Synthetic
gucuaagtatcattuuu

SEQ ID NO: 5088 - DNA, 17 bp, Artificial Sequence
  Synthetic
uguctaagtatcatuuu

SEQ ID NO: 5089 - DNA, 17 bp, Artificial Sequence
  Synthetic
cuguctaagtatcauuu

SEQ ID NO: 5090 - DNA, 17 bp, Artificial Sequence
  Synthetic
ucugtctaagtatcauu

SEQ ID NO: 5091 - DNA, 17 bp, Artificial Sequence
  Synthetic
uucugtctaagtatcau

SEQ ID NO: 5092 - DNA, 17 bp, Artificial Sequence
  Synthetic
auuctgtctaagtauca

SEQ ID NO: 5093 - DNA, 17 bp, Artificial Sequence
  Synthetic
aauuctgtctaagtauc

SEQ ID NO: 5094 - DNA, 17 bp, Artificial Sequence
  Synthetic
caautctgtctaaguau

SEQ ID NO: 5095 - DNA, 17 bp, Artificial Sequence
  Synthetic
acaattctgtctaagua

SEQ ID NO: 5096 - DNA, 17 bp, Artificial Sequence
  Synthetic
gacaattctgtctaagu

SEQ ID NO: 5097 - DNA, 17 bp, Artificial Sequence
  Synthetic
ugacaattctgtctaag

SEQ ID NO: 5098 - DNA, 17 bp, Artificial Sequence
  Synthetic
cugacaattctgtcuaa

SEQ ID NO: 5099 - DNA, 17 bp, Artificial Sequence
  Synthetic
acugacaattctgtcua

SEQ ID NO: 5100 - DNA, 17 bp, Artificial Sequence
  Synthetic
uacugacaattctgucu

SEQ ID NO: 5101 - DNA, 17 bp, Artificial Sequence
  Synthetic
auactgacaattctguc

SEQ ID NO: 5102 - DNA, 17 bp, Artificial Sequence
  Synthetic
aauactgacaattcugu

SEQ ID NO: 5103 - DNA, 17 bp, Artificial Sequence
  Synthetic
uaauactgacaattcug

SEQ ID NO: 5104 - DNA, 17 bp, Artificial Sequence
  Synthetic
auaatactgacaatucu

SEQ ID NO: 5105 - DNA, 17 bp, Artificial Sequence
  Synthetic
aauaatactgacaauuc

SEQ ID NO: 5106 - DNA, 17 bp, Artificial Sequence
  Synthetic
gaauaatactgacaauu

SEQ ID NO: 5107 - DNA, 17 bp, Artificial Sequence
  Synthetic
ugaataatactgacaau

SEQ ID NO: 5108 - DNA, 17 bp, Artificial Sequence
  Synthetic
uugaataatactgacaa

SEQ ID NO: 5109 - DNA, 17 bp, Artificial Sequence
  Synthetic
cuugaataatactgaca

SEQ ID NO: 5110 - DNA, 17 bp, Artificial Sequence
  Synthetic
ucuugaataatactgac

SEQ ID NO: 5111 - DNA, 17 bp, Artificial Sequence
  Synthetic
uucutgaataatacuga

SEQ ID NO: 5112 - DNA, 17 bp, Artificial Sequence
  Synthetic
guucttgaataatacug

SEQ ID NO: 5113 - DNA, 17 bp, Artificial Sequence
  Synthetic
uguucttgaataatacu

SEQ ID NO: 5114 - DNA, 17 bp, Artificial Sequence
  Synthetic
augutcttgaataauac

SEQ ID NO: 5115 - DNA, 17 bp, Artificial Sequence
  Synthetic
aaugttcttgaataaua

SEQ ID NO: 5116 - DNA, 17 bp, Artificial Sequence
  Synthetic
aaaugttcttgaataau

SEQ ID NO: 5117 - DNA, 17 bp, Artificial Sequence
  Synthetic
uaaatgttcttgaauaa

SEQ ID NO: 5118 - DNA, 17 bp, Artificial Sequence
  Synthetic
cuaaatgttcttgaaua

SEQ ID NO: 5119 - DNA, 17 bp, Artificial Sequence
  Synthetic
ccuaaatgttcttgaau

SEQ ID NO: 5120 - DNA, 17 bp, Artificial Sequence
  Synthetic
gccuaaatgttcttgaa

SEQ ID NO: 5121 - DNA, 17 bp, Artificial Sequence
  Synthetic
agcctaaatgttctuga

SEQ ID NO: 5122 - DNA, 17 bp, Artificial Sequence
  Synthetic
uagcctaaatgttcuug

SEQ ID NO: 5123 - DNA, 17 bp, Artificial Sequence
  Synthetic
auagcctaaatgttcuu

SEQ ID NO: 5124 - DNA, 17 bp, Artificial Sequence
  Synthetic
uauagcctaaatgtucu

SEQ ID NO: 5125 - DNA, 17 bp, Artificial Sequence
  Synthetic
cuauagcctaaatguuc

SEQ ID NO: 5126 - DNA, 17 bp, Artificial Sequence
  Synthetic
ccuatagcctaaatguu

SEQ ID NO: 5127 - DNA, 17 bp, Artificial Sequence
  Synthetic
uccuatagcctaaaugu

SEQ ID NO: 5128 - DNA, 17 bp, Artificial Sequence
  Synthetic
aucctatagcctaaaug

SEQ ID NO: 5129 - DNA, 17 bp, Artificial Sequence
  Synthetic
caucctatagcctaaau

SEQ ID NO: 5130 - DNA, 17 bp, Artificial Sequence
  Synthetic
acaucctatagcctaaa

SEQ ID NO: 5131 - DNA, 17 bp, Artificial Sequence
  Synthetic
aacatcctatagccuaa

SEQ ID NO: 5132 - DNA, 17 bp, Artificial Sequence
  Synthetic
uaacatcctatagccua

SEQ ID NO: 5133 - DNA, 17 bp, Artificial Sequence
  Synthetic
uuaacatcctatagccu

SEQ ID NO: 5134 - DNA, 17 bp, Artificial Sequence
  Synthetic
uuuaacatcctatagcc

SEQ ID NO: 5135 - DNA, 17 bp, Artificial Sequence
  Synthetic
auuuaacatcctatagc

SEQ ID NO: 5136 - DNA, 17 bp, Artificial Sequence
  Synthetic
cauutaacatcctauag

SEQ ID NO: 5137 - DNA, 17 bp, Artificial Sequence
  Synthetic
ucauttaacatcctaua

SEQ ID NO: 5138 - DNA, 17 bp, Artificial Sequence
  Synthetic
gucatttaacatccuau

SEQ ID NO: 5139 - DNA, 17 bp, Artificial Sequence
  Synthetic
ugucatttaacatccua

SEQ ID NO: 5140 - DNA, 17 bp, Artificial Sequence
  Synthetic
uugucatttaacatccu

SEQ ID NO: 5141 - DNA, 17 bp, Artificial Sequence
  Synthetic
uuugtcatttaacaucc

SEQ ID NO: 5142 - DNA, 17 bp, Artificial Sequence
  Synthetic
uuuugtcatttaacauc

SEQ ID NO: 5143 - DNA, 17 bp, Artificial Sequence
  Synthetic
cuuutgtcatttaacau

SEQ ID NO: 5144 - DNA, 17 bp, Artificial Sequence
  Synthetic
ccuuttgtcatttaaca

SEQ ID NO: 5145 - DNA, 17 bp, Artificial Sequence
  Synthetic
uccutttgtcatttaac

SEQ ID NO: 5146 - DNA, 17 bp, Artificial Sequence
  Synthetic
uuccttttgtcattuaa

SEQ ID NO: 5147 - DNA, 17 bp, Artificial Sequence
  Synthetic
cuuccttttgtcatuua

SEQ ID NO: 5148 - DNA, 17 bp, Artificial Sequence
  Synthetic
ccuuccttttgtcauuu

SEQ ID NO: 5149 - DNA, 17 bp, Artificial Sequence
  Synthetic
uccutccttttgtcauu

SEQ ID NO: 5150 - DNA, 17 bp, Artificial Sequence
  Synthetic
guccttccttttgtcau

SEQ ID NO: 5151 - DNA, 17 bp, Artificial Sequence
  Synthetic
uguccttccttttguca

SEQ ID NO: 5152 - DNA, 17 bp, Artificial Sequence
  Synthetic
uuguccttccttttguc

SEQ ID NO: 5153 - DNA, 17 bp, Artificial Sequence
  Synthetic
uuugtccttcctttugu

SEQ ID NO: 5154 - DNA, 17 bp, Artificial Sequence
  Synthetic
uuuugtccttccttuug

SEQ ID NO: 5155 - DNA, 17 bp, Artificial Sequence
  Synthetic
uuuutgtccttcctuuu

SEQ ID NO: 5156 - DNA, 17 bp, Artificial Sequence
  Synthetic
auuuttgtccttccuuu

SEQ ID NO: 5157 - DNA, 17 bp, Artificial Sequence
  Synthetic
uauutttgtccttccuu

SEQ ID NO: 5158 - DNA, 17 bp, Artificial Sequence
  Synthetic
auauttttgtccttccu

SEQ ID NO: 5159 - DNA, 17 bp, Artificial Sequence
  Synthetic
uauatttttgtcctucc

SEQ ID NO: 5160 - DNA, 17 bp, Artificial Sequence
  Synthetic
auauatttttgtccuuc

SEQ ID NO: 5161 - DNA, 17 bp, Artificial Sequence
  Synthetic
uauatatttttgtccuu

SEQ ID NO: 5162 - DNA, 17 bp, Artificial Sequence
  Synthetic
auauatatttttgtccu

SEQ ID NO: 5163 - DNA, 17 bp, Artificial Sequence
  Synthetic
cauatatatttttgucc

SEQ ID NO: 5164 - DNA, 17 bp, Artificial Sequence
  Synthetic
acauatatatttttguc

SEQ ID NO: 5165 - DNA, 17 bp, Artificial Sequence
  Synthetic
uacatatatattttugu

SEQ ID NO: 5166 - DNA, 17 bp, Artificial Sequence
  Synthetic
auacatatatatttuug

SEQ ID NO: 5167 - DNA, 17 bp, Artificial Sequence
  Synthetic
cauacatatatattuuu

SEQ ID NO: 5168 - DNA, 17 bp, Artificial Sequence
  Synthetic
acauacatatatatuuu

SEQ ID NO: 5169 - DNA, 17 bp, Artificial Sequence
  Synthetic
cacatacatatatauuu

SEQ ID NO: 5170 - DNA, 17 bp, Artificial Sequence
  Synthetic
ucacatacatatatauu

SEQ ID NO: 5171 - DNA, 17 bp, Artificial Sequence
  Synthetic
gucacatacatatauau

SEQ ID NO: 5172 - DNA, 17 bp, Artificial Sequence
  Synthetic
ggucacatacatataua

SEQ ID NO: 5173 - DNA, 17 bp, Artificial Sequence
  Synthetic
gggucacatacatauau

SEQ ID NO: 5174 - DNA, 17 bp, Artificial Sequence
  Synthetic
agggtcacatacataua

SEQ ID NO: 5175 - DNA, 17 bp, Artificial Sequence
  Synthetic
uagggtcacatacauau

SEQ ID NO: 5176 - DNA, 17 bp, Artificial Sequence
  Synthetic
guagggtcacatacaua

SEQ ID NO: 5177 - DNA, 17 bp, Artificial Sequence
  Synthetic
gguagggtcacatacau

SEQ ID NO: 5178 - DNA, 17 bp, Artificial Sequence
  Synthetic
ggguagggtcacataca

SEQ ID NO: 5179 - DNA, 17 bp, Artificial Sequence
  Synthetic
ugggtagggtcacauac

SEQ ID NO: 5180 - DNA, 17 bp, Artificial Sequence
  Synthetic
augggtagggtcacaua

SEQ ID NO: 5181 - DNA, 17 bp, Artificial Sequence
  Synthetic
uaugggtagggtcacau

SEQ ID NO: 5182 - DNA, 17 bp, Artificial Sequence
  Synthetic
uuaugggtagggtcaca

SEQ ID NO: 5183 - DNA, 17 bp, Artificial Sequence
  Synthetic
uuuatgggtagggtcac

SEQ ID NO: 5184 - DNA, 17 bp, Artificial Sequence
  Synthetic
uuuuatgggtaggguca

SEQ ID NO: 5185 - DNA, 17 bp, Artificial Sequence
  Synthetic
uuuutatgggtaggguc

SEQ ID NO: 5186 - DNA, 17 bp, Artificial Sequence
  Synthetic
uuuuttatgggtagggu

SEQ ID NO: 5187 - DNA, 17 bp, Artificial Sequence
  Synthetic
auuutttatgggtaggg

SEQ ID NO: 5188 - DNA, 17 bp, Artificial Sequence
  Synthetic
cauuttttatgggtagg

SEQ ID NO: 5189 - DNA, 17 bp, Artificial Sequence
  Synthetic
ucautttttatggguag

SEQ ID NO: 5190 - DNA, 17 bp, Artificial Sequence
  Synthetic
uucattttttatgggua

SEQ ID NO: 5191 - DNA, 17 bp, Artificial Sequence
  Synthetic
uuucattttttatgggu

SEQ ID NO: 5192 - DNA, 17 bp, Artificial Sequence
  Synthetic
auuucattttttatggg

SEQ ID NO: 5193 - DNA, 17 bp, Artificial Sequence
  Synthetic
uauutcattttttaugg

SEQ ID NO: 5194 - DNA, 17 bp, Artificial Sequence
  Synthetic
auauttcattttttaug

SEQ ID NO: 5195 - DNA, 17 bp, Artificial Sequence
  Synthetic
aauatttcatttttuau

SEQ ID NO: 5196 - DNA, 17 bp, Artificial Sequence
  Synthetic
gaauatttcattttuua

SEQ ID NO: 5197 - DNA, 17 bp, Artificial Sequence
  Synthetic
ugaatatttcatttuuu

SEQ ID NO: 5198 - DNA, 17 bp, Artificial Sequence
  Synthetic
gugaatatttcattuuu

SEQ ID NO: 5199 - DNA, 17 bp, Artificial Sequence
  Synthetic
ugugaatatttcatuuu

SEQ ID NO: 5200 - DNA, 17 bp, Artificial Sequence
  Synthetic
cugugaatatttcauuu

SEQ ID NO: 5201 - DNA, 17 bp, Artificial Sequence
  Synthetic
ucugtgaatatttcauu

SEQ ID NO: 5202 - DNA, 17 bp, Artificial Sequence
  Synthetic
uucugtgaatatttcau

SEQ ID NO: 5203 - DNA, 17 bp, Artificial Sequence
  Synthetic
auuctgtgaatattuca

SEQ ID NO: 5204 - DNA, 17 bp, Artificial Sequence
  Synthetic
gauuctgtgaatatuuc

SEQ ID NO: 5205 - DNA, 17 bp, Artificial Sequence
  Synthetic
ugautctgtgaatauuu

SEQ ID NO: 5206 - DNA, 17 bp, Artificial Sequence
  Synthetic
cugattctgtgaatauu

SEQ ID NO: 5207 - DNA, 17 bp, Artificial Sequence
  Synthetic
ucugattctgtgaauau

SEQ ID NO: 5208 - DNA, 17 bp, Artificial Sequence
  Synthetic
aucugattctgtgaaua

SEQ ID NO: 5209 - DNA, 17 bp, Artificial Sequence
  Synthetic
gauctgattctgtgaau

SEQ ID NO: 5210 - DNA, 17 bp, Artificial Sequence
  Synthetic
agauctgattctgtgaa

SEQ ID NO: 5211 - DNA, 17 bp, Artificial Sequence
  Synthetic
cagatctgattctguga

SEQ ID NO: 5212 - DNA, 17 bp, Artificial Sequence
  Synthetic
ucagatctgattctgug

SEQ ID NO: 5213 - DNA, 17 bp, Artificial Sequence
  Synthetic
uucagatctgattcugu

SEQ ID NO: 5214 - DNA, 17 bp, Artificial Sequence
  Synthetic
uuucagatctgattcug

SEQ ID NO: 5215 - DNA, 17 bp, Artificial Sequence
  Synthetic
uuuucagatctgatucu

SEQ ID NO: 5216 - DNA, 17 bp, Artificial Sequence
  Synthetic
guuutcagatctgauuc

SEQ ID NO: 5217 - DNA, 17 bp, Artificial Sequence
  Synthetic
uguuttcagatctgauu

SEQ ID NO: 5218 - DNA, 17 bp, Artificial Sequence
  Synthetic
gugutttcagatctgau

SEQ ID NO: 5219 - DNA, 17 bp, Artificial Sequence
  Synthetic
ugugttttcagatcuga

SEQ ID NO: 5220 - DNA, 17 bp, Artificial Sequence
  Synthetic
augugttttcagatcug

SEQ ID NO: 5221 - DNA, 17 bp, Artificial Sequence
  Synthetic
caugtgttttcagaucu

SEQ ID NO: 5222 - DNA, 17 bp, Artificial Sequence
  Synthetic
acaugtgttttcagauc

SEQ ID NO: 5223 - DNA, 17 bp, Artificial Sequence
  Synthetic
gacatgtgttttcagau

SEQ ID NO: 5224 - DNA, 17 bp, Artificial Sequence
  Synthetic
ggacatgtgttttcaga

SEQ ID NO: 5225 - DNA, 17 bp, Artificial Sequence
  Synthetic
gggacatgtgttttcag

SEQ ID NO: 5226 - DNA, 17 bp, Artificial Sequence
  Synthetic
ugggacatgtgtttuca

SEQ ID NO: 5227 - DNA, 17 bp, Artificial Sequence
  Synthetic
cugggacatgtgttuuc

SEQ ID NO: 5228 - DNA, 17 bp, Artificial Sequence
  Synthetic
ucugggacatgtgtuuu

SEQ ID NO: 5229 - DNA, 17 bp, Artificial Sequence
  Synthetic
gucugggacatgtguuu

SEQ ID NO: 5230 - DNA, 17 bp, Artificial Sequence
  Synthetic
aguctgggacatgtguu

SEQ ID NO: 5231 - DNA, 17 bp, Artificial Sequence
  Synthetic
caguctgggacatgugu

SEQ ID NO: 5232 - DNA, 17 bp, Artificial Sequence
  Synthetic
gcagtctgggacatgug

SEQ ID NO: 5233 - DNA, 17 bp, Artificial Sequence
  Synthetic
ugcagtctgggacaugu

SEQ ID NO: 5234 - DNA, 17 bp, Artificial Sequence
  Synthetic
augcagtctgggacaug

SEQ ID NO: 5235 - DNA, 17 bp, Artificial Sequence
  Synthetic
uaugcagtctgggacau

SEQ ID NO: 5236 - DNA, 17 bp, Artificial Sequence
  Synthetic
guaugcagtctgggaca

SEQ ID NO: 5237 - DNA, 17 bp, Artificial Sequence
  Synthetic
aguatgcagtctgggac

SEQ ID NO: 5238 - DNA, 17 bp, Artificial Sequence
  Synthetic
caguatgcagtctggga

SEQ ID NO: 5239 - DNA, 17 bp, Artificial Sequence
  Synthetic
ccagtatgcagtctggg

SEQ ID NO: 5240 - DNA, 17 bp, Artificial Sequence
  Synthetic
cccagtatgcagtcugg

SEQ ID NO: 5241 - DNA, 17 bp, Artificial Sequence
  Synthetic
ccccagtatgcagtcug

SEQ ID NO: 5242 - DNA, 17 bp, Artificial Sequence
  Synthetic
accccagtatgcagucu

SEQ ID NO: 5243 - DNA, 17 bp, Artificial Sequence
  Synthetic
gaccccagtatgcaguc

SEQ ID NO: 5244 - DNA, 17 bp, Artificial Sequence
  Synthetic
cgaccccagtatgcagu

SEQ ID NO: 5245 - DNA, 17 bp, Artificial Sequence
  Synthetic
acgaccccagtatgcag

SEQ ID NO: 5246 - DNA, 17 bp, Artificial Sequence
  Synthetic
gacgaccccagtatgca

SEQ ID NO: 5247 - DNA, 17 bp, Artificial Sequence
  Synthetic
ugacgaccccagtaugc

SEQ ID NO: 5248 - DNA, 17 bp, Artificial Sequence
  Synthetic
augacgaccccagtaug

SEQ ID NO: 5249 - RNA, 17 nt, Artificial Sequence
  Synthetic
caugacgaccccaguau

SEQ ID NO: 5250 - RNA, 17 nt, Artificial Sequence
  Synthetic
ucaugacgaccccagua

SEQ ID NO: 5251 - DNA, 17 bp, Artificial Sequence
  Synthetic
cucatgacgaccccagu

SEQ ID NO: 5252 - DNA, 17 bp, Artificial Sequence
  Synthetic
ccucatgacgaccccag

SEQ ID NO: 5253 - DNA, 17 bp, Artificial Sequence
  Synthetic
accucatgacgacccca

SEQ ID NO: 5254 - DNA, 17 bp, Artificial Sequence
  Synthetic
cacctcatgacgacccc

SEQ ID NO: 5255 - DNA, 17 bp, Artificial Sequence
  Synthetic
acacctcatgacgaccc

SEQ ID NO: 5256 - DNA, 17 bp, Artificial Sequence
  Synthetic
gacacctcatgacgacc

SEQ ID NO: 5257 - DNA, 17 bp, Artificial Sequence
  Synthetic
agacacctcatgacgac

SEQ ID NO: 5258 - DNA, 17 bp, Artificial Sequence
  Synthetic
gagacacctcatgacga

SEQ ID NO: 5259 - DNA, 17 bp, Artificial Sequence
  Synthetic
ggagacacctcatgacg

SEQ ID NO: 5260 - DNA, 17 bp, Artificial Sequence
  Synthetic
aggagacacctcatgac

SEQ ID NO: 5261 - DNA, 17 bp, Artificial Sequence
  Synthetic
aaggagacacctcauga

SEQ ID NO: 5262 - DNA, 17 bp, Artificial Sequence
  Synthetic
gaaggagacacctcaug

SEQ ID NO: 5263 - DNA, 17 bp, Artificial Sequence
  Synthetic
ggaaggagacacctcau

SEQ ID NO: 5264 - RNA, 17 nt, Artificial Sequence
  Synthetic
aggaaggagacaccuca

SEQ ID NO: 5265 - RNA, 17 nt, Artificial Sequence
  Synthetic
aaggaaggagacaccuc

SEQ ID NO: 5266 - RNA, 17 nt, Artificial Sequence
  Synthetic
gaaggaaggagacaccu

SEQ ID NO: 5267 - DNA, 17 bp, Artificial Sequence
  Synthetic
agaaggaaggagacacc

SEQ ID NO: 5268 - DNA, 17 bp, Artificial Sequence
  Synthetic
cagaaggaaggagacac

SEQ ID NO: 5269 - DNA, 17 bp, Artificial Sequence
  Synthetic
acagaaggaaggagaca

SEQ ID NO: 5270 - DNA, 17 bp, Artificial Sequence
  Synthetic
cacagaaggaaggagac

SEQ ID NO: 5271 - DNA, 17 bp, Artificial Sequence
  Synthetic
acacagaaggaaggaga

SEQ ID NO: 5272 - RNA, 17 nt, Artificial Sequence
  Synthetic
uacacagaaggaaggag

SEQ ID NO: 5273 - RNA, 17 nt, Artificial Sequence
  Synthetic
guacacagaaggaagga

SEQ ID NO: 5274 - RNA, 17 nt, Artificial Sequence
  Synthetic
aguacacagaaggaagg

SEQ ID NO: 5275 - RNA, 17 nt, Artificial Sequence
  Synthetic
aaguacacagaaggaag

SEQ ID NO: 5276 - DNA, 17 bp, Artificial Sequence
  Synthetic
aaagtacacagaaggaa

SEQ ID NO: 5277 - DNA, 17 bp, Artificial Sequence
  Synthetic
aaaagtacacagaagga

SEQ ID NO: 5278 - DNA, 17 bp, Artificial Sequence
  Synthetic
gaaaagtacacagaagg

SEQ ID NO: 5279 - DNA, 17 bp, Artificial Sequence
  Synthetic
ggaaaagtacacagaag

SEQ ID NO: 5280 - DNA, 17 bp, Artificial Sequence
  Synthetic
aggaaaagtacacagaa

SEQ ID NO: 5281 - DNA, 17 bp, Artificial Sequence
  Synthetic
aaggaaaagtacacaga

SEQ ID NO: 5282 - DNA, 17 bp, Artificial Sequence
  Synthetic
caaggaaaagtacacag

SEQ ID NO: 5283 - DNA, 17 bp, Artificial Sequence
  Synthetic
ucaaggaaaagtacaca

SEQ ID NO: 5284 - DNA, 17 bp, Artificial Sequence
  Synthetic
uucaaggaaaagtacac

SEQ ID NO: 5285 - DNA, 17 bp, Artificial Sequence
  Synthetic
auucaaggaaaagtaca

SEQ ID NO: 5286 - RNA, 17 nt, Artificial Sequence
  Synthetic
cauucaaggaaaaguac

SEQ ID NO: 5287 - DNA, 17 bp, Artificial Sequence
  Synthetic
acautcaaggaaaagua

SEQ ID NO: 5288 - DNA, 17 bp, Artificial Sequence
  Synthetic
cacattcaaggaaaagu

SEQ ID NO: 5289 - DNA, 17 bp, Artificial Sequence
  Synthetic
gcacattcaaggaaaag

SEQ ID NO: 5290 - DNA, 17 bp, Artificial Sequence
  Synthetic
ugcacattcaaggaaaa

SEQ ID NO: 5291 - DNA, 17 bp, Artificial Sequence
  Synthetic
gugcacattcaaggaaa

SEQ ID NO: 5292 - DNA, 17 bp, Artificial Sequence
  Synthetic
agugcacattcaaggaa

SEQ ID NO: 5293 - DNA, 17 bp, Artificial Sequence
  Synthetic
aagugcacattcaagga

SEQ ID NO: 5294 - DNA, 17 bp, Artificial Sequence
  Synthetic
aaagtgcacattcaagg

SEQ ID NO: 5295 - DNA, 17 bp, Artificial Sequence
  Synthetic
aaaagtgcacattcaag

SEQ ID NO: 5296 - DNA, 17 bp, Artificial Sequence
  Synthetic
uaaaagtgcacattcaa

SEQ ID NO: 5297 - DNA, 17 bp, Artificial Sequence
  Synthetic
auaaaagtgcacatuca

SEQ ID NO: 5298 - DNA, 17 bp, Artificial Sequence
  Synthetic
uauaaaagtgcacauuc

SEQ ID NO: 5299 - DNA, 17 bp, Artificial Sequence
  Synthetic
uuauaaaagtgcacauu

SEQ ID NO: 5300 - DNA, 17 bp, Artificial Sequence
  Synthetic
guuataaaagtgcacau

SEQ ID NO: 5301 - DNA, 17 bp, Artificial Sequence
  Synthetic
uguuataaaagtgcaca

SEQ ID NO: 5302 - DNA, 17 bp, Artificial Sequence
  Synthetic
augutataaaagtgcac

SEQ ID NO: 5303 - DNA, 17 bp, Artificial Sequence
  Synthetic
caugttataaaagtgca

SEQ ID NO: 5304 - DNA, 17 bp, Artificial Sequence
  Synthetic
ucaugttataaaagugc

SEQ ID NO: 5305 - DNA, 17 bp, Artificial Sequence
  Synthetic
uucatgttataaaagug

SEQ ID NO: 5306 - DNA, 17 bp, Artificial Sequence
  Synthetic
uuucatgttataaaagu

SEQ ID NO: 5307 - DNA, 17 bp, Artificial Sequence
  Synthetic
uuuucatgttataaaag

SEQ ID NO: 5308 - DNA, 17 bp, Artificial Sequence
  Synthetic
uuuutcatgttataaaa

SEQ ID NO: 5309 - DNA, 17 bp, Artificial Sequence
  Synthetic
auuuttcatgttataaa

SEQ ID NO: 5310 - DNA, 17 bp, Artificial Sequence
  Synthetic
uauutttcatgttauaa

SEQ ID NO: 5311 - DNA, 17 bp, Artificial Sequence
  Synthetic
uuauttttcatgttaua

SEQ ID NO: 5312 - DNA, 17 bp, Artificial Sequence
  Synthetic
uuuatttttcatgtuau

SEQ ID NO: 5313 - DNA, 17 bp, Artificial Sequence
  Synthetic
cuuuatttttcatguua

SEQ ID NO: 5314 - DNA, 17 bp, Artificial Sequence
  Synthetic
ccuutatttttcatguu

SEQ ID NO: 5315 - DNA, 17 bp, Artificial Sequence
  Synthetic
accuttatttttcaugu

SEQ ID NO: 5316 - DNA, 17 bp, Artificial Sequence
  Synthetic
cacctttatttttcaug

SEQ ID NO: 5317 - DNA, 17 bp, Artificial Sequence
  Synthetic
ccacctttatttttcau

SEQ ID NO: 5318 - DNA, 17 bp, Artificial Sequence
  Synthetic
cccacctttattttuca

SEQ ID NO: 5319 - DNA, 17 bp, Artificial Sequence
  Synthetic
ccccacctttatttuuc

SEQ ID NO: 5320 - DNA, 17 bp, Artificial Sequence
  Synthetic
uccccacctttattuuu

SEQ ID NO: 5321 - DNA, 17 bp, Artificial Sequence
  Synthetic
uuccccacctttatuuu

SEQ ID NO: 5322 - DNA, 17 bp, Artificial Sequence
  Synthetic
uuuccccacctttauuu

SEQ ID NO: 5323 - DNA, 17 bp, Artificial Sequence
  Synthetic
uuuuccccacctttauu

SEQ ID NO: 5324 - DNA, 17 bp, Artificial Sequence
  Synthetic
uuuutccccaccttuau

SEQ ID NO: 5325 - DNA, 17 bp, Artificial Sequence
  Synthetic
uuuuttccccacctuua

SEQ ID NO: 5326 - DNA, 17 bp, Artificial Sequence
  Synthetic
cuuutttccccaccuuu

SEQ ID NO: 5327 - DNA, 17 bp, Artificial Sequence
  Synthetic
acuuttttccccaccuu

SEQ ID NO: 5328 - DNA, 17 bp, Artificial Sequence
  Synthetic
gacutttttccccaccu

SEQ ID NO: 5329 - DNA, 17 bp, Artificial Sequence
  Synthetic
agacttttttccccacc

SEQ ID NO: 5330 - DNA, 17 bp, Artificial Sequence
  Synthetic
cagacttttttccccac

SEQ ID NO: 5331 - DNA, 17 bp, Artificial Sequence
  Synthetic
ucagacttttttcccca

SEQ ID NO: 5332 - DNA, 17 bp, Artificial Sequence
  Synthetic
uucagacttttttcccc

SEQ ID NO: 5333 - DNA, 17 bp, Artificial Sequence
  Synthetic
cuucagacttttttccc

SEQ ID NO: 5334 - DNA, 17 bp, Artificial Sequence
  Synthetic
ucuucagactttttucc

SEQ ID NO: 5335 - DNA, 17 bp, Artificial Sequence
  Synthetic
aucutcagacttttuuc

SEQ ID NO: 5336 - DNA, 17 bp, Artificial Sequence
  Synthetic
gaucttcagactttuuu

SEQ ID NO: 5337 - RNA, 17 nt, Artificial Sequence
  Synthetic
gagggaggagggucugg

SEQ ID NO: 5338 - RNA, 17 nt, Artificial Sequence
  Synthetic
cgagggaggagggucug

SEQ ID NO: 5339 - RNA, 17 nt, Artificial Sequence
  Synthetic
ccgagggaggagggucu

SEQ ID NO: 5340 - RNA, 17 nt, Artificial Sequence
  Synthetic
uccgagggaggaggguc

SEQ ID NO: 5341 - RNA, 17 nt, Artificial Sequence
  Synthetic
uuccgagggaggagggu

SEQ ID NO: 5342 - RNA, 17 nt, Artificial Sequence
  Synthetic
guuccgagggaggaggg

SEQ ID NO: 5343 - RNA, 17 nt, Artificial Sequence
  Synthetic
gguuccgagggaggagg

SEQ ID NO: 5344 - RNA, 17 nt, Artificial Sequence
  Synthetic
ugguuccgagggaggag

SEQ ID NO: 5345 - RNA, 17 nt, Artificial Sequence
  Synthetic
cugguuccgagggagga

SEQ ID NO: 5346 - RNA, 17 nt, Artificial Sequence
  Synthetic
ccugguuccgagggagg

SEQ ID NO: 5347 - RNA, 17 nt, Artificial Sequence
  Synthetic
uccugguuccgagggag

SEQ ID NO: 5348 - RNA, 17 nt, Artificial Sequence
  Synthetic
cuccugguuccgaggga

SEQ ID NO: 5349 - RNA, 17 nt, Artificial Sequence
  Synthetic
gcuccugguuccgaggg

SEQ ID NO: 5350 - RNA, 17 nt, Artificial Sequence
  Synthetic
ggcuccugguuccgagg

SEQ ID NO: 5351 - RNA, 17 nt, Artificial Sequence
  Synthetic
aggcuccugguuccgag

SEQ ID NO: 5352 - RNA, 17 nt, Artificial Sequence
  Synthetic
caggcuccugguuccga

SEQ ID NO: 5353 - RNA, 17 nt, Artificial Sequence
  Synthetic
ucaggcuccugguuccg

SEQ ID NO: 5354 - RNA, 17 nt, Artificial Sequence
  Synthetic
uucaggcuccugguucc

SEQ ID NO: 5355 - RNA, 17 nt, Artificial Sequence
  Synthetic
guucaggcuccugguuc

SEQ ID NO: 5356 - RNA, 17 nt, Artificial Sequence
  Synthetic
uguucaggcuccugguu

SEQ ID NO: 5357 - RNA, 17 nt, Artificial Sequence
  Synthetic
uuguucaggcuccuggu

SEQ ID NO: 5358 - RNA, 17 nt, Artificial Sequence
  Synthetic
guuguucaggcuccugg

SEQ ID NO: 5359 - RNA, 17 nt, Artificial Sequence
  Synthetic
uguuguucaggcuccug

SEQ ID NO: 5360 - RNA, 17 nt, Artificial Sequence
  Synthetic
cuguuguucaggcuccu

SEQ ID NO: 5361 - RNA, 17 nt, Artificial Sequence
  Synthetic
gcuguuguucaggcucc

SEQ ID NO: 5362 - RNA, 17 nt, Artificial Sequence
  Synthetic
ggcuguuguucaggcuc

SEQ ID NO: 5363 - RNA, 17 nt, Artificial Sequence
  Synthetic
gggcuguuguucaggcu

SEQ ID NO: 5364 - RNA, 17 nt, Artificial Sequence
  Synthetic
agggcuguuguucaggc

SEQ ID NO: 5365 - RNA, 17 nt, Artificial Sequence
  Synthetic
aagggcuguuguucagg

SEQ ID NO: 5366 - RNA, 17 nt, Artificial Sequence
  Synthetic
gaagggcuguuguucag

SEQ ID NO: 5367 - RNA, 17 nt, Artificial Sequence
  Synthetic
agaagggcuguuguuca

SEQ ID NO: 5368 - RNA, 17 nt, Artificial Sequence
  Synthetic
cagaagggcuguuguuc

SEQ ID NO: 5369 - RNA, 17 nt, Artificial Sequence
  Synthetic
ccagaagggcuguuguu

SEQ ID NO: 5370 - RNA, 17 nt, Artificial Sequence
  Synthetic
accagaagggcuguugu

SEQ ID NO: 5371 - RNA, 17 nt, Artificial Sequence
  Synthetic
gaccagaagggcuguug

SEQ ID NO: 5372 - RNA, 17 nt, Artificial Sequence
  Synthetic
ggaccagaagggcuguu

SEQ ID NO: 5373 - RNA, 17 nt, Artificial Sequence
  Synthetic
aggaccagaagggcugu

SEQ ID NO: 5374 - RNA, 17 nt, Artificial Sequence
  Synthetic
gaggaccagaagggcug

SEQ ID NO: 5375 - RNA, 17 nt, Artificial Sequence
  Synthetic
cgaggaccagaagggcu

SEQ ID NO: 5376 - DNA, 17 bp, Artificial Sequence
  Synthetic
gcgaggaccagaagggc

SEQ ID NO: 5377 - DNA, 17 bp, Artificial Sequence
  Synthetic
ggcgaggaccagaaggg

SEQ ID NO: 5378 - DNA, 17 bp, Artificial Sequence
  Synthetic
gggcgaggaccagaagg

SEQ ID NO: 5379 - DNA, 17 bp, Artificial Sequence
  Synthetic
ggggcgaggaccagaag

SEQ ID NO: 5380 - DNA, 17 bp, Artificial Sequence
  Synthetic
gggggcgaggaccagaa

SEQ ID NO: 5381 - RNA, 17 nt, Artificial Sequence
  Synthetic
ugggggcgaggaccaga

SEQ ID NO: 5382 - RNA, 17 nt, Artificial Sequence
  Synthetic
augggggcgaggaccag

SEQ ID NO: 5383 - RNA, 17 nt, Artificial Sequence
  Synthetic
gaugggggcgaggacca

SEQ ID NO: 5384 - RNA, 17 nt, Artificial Sequence
  Synthetic
ggaugggggcgaggacc

SEQ ID NO: 5385 - RNA, 17 nt, Artificial Sequence
  Synthetic
aggaugggggcgaggac

SEQ ID NO: 5386 - RNA, 17 nt, Artificial Sequence
  Synthetic
gaggaugggggcgagga

SEQ ID NO: 5387 - RNA, 17 nt, Artificial Sequence
  Synthetic
agaggaugggggcgagg

SEQ ID NO: 5388 - RNA, 17 nt, Artificial Sequence
  Synthetic
gagaggaugggggcgag

SEQ ID NO: 5389 - RNA, 17 nt, Artificial Sequence
  Synthetic
agagaggaugggggcga

SEQ ID NO: 5390 - RNA, 17 nt, Artificial Sequence
  Synthetic
cagagaggaugggggcg

SEQ ID NO: 5391 - RNA, 17 nt, Artificial Sequence
  Synthetic
ucagagaggaugggggc

SEQ ID NO: 5392 - RNA, 17 nt, Artificial Sequence
  Synthetic
gucagagaggauggggg

SEQ ID NO: 5393 - RNA, 17 nt, Artificial Sequence
  Synthetic
agucagagaggaugggg

SEQ ID NO: 5394 - RNA, 17 nt, Artificial Sequence
  Synthetic
cagucagagaggauggg

SEQ ID NO: 5395 - RNA, 17 nt, Artificial Sequence
  Synthetic
ucagucagagaggaugg

SEQ ID NO: 5396 - RNA, 17 nt, Artificial Sequence
  Synthetic
gucagucagagaggaug

SEQ ID NO: 5397 - RNA, 17 nt, Artificial Sequence
  Synthetic
ugucagucagagaggau

SEQ ID NO: 5398 - RNA, 17 nt, Artificial Sequence
  Synthetic
cugucagucagagagga

SEQ ID NO: 5399 - RNA, 17 nt, Artificial Sequence
  Synthetic
gcugucagucagagagg

SEQ ID NO: 5400 - RNA, 17 nt, Artificial Sequence
  Synthetic
agcugucagucagagag

SEQ ID NO: 5401 - RNA, 17 nt, Artificial Sequence
  Synthetic
gagcugucagucagaga

SEQ ID NO: 5402 - RNA, 17 nt, Artificial Sequence
  Synthetic
agagcugucagucagag

SEQ ID NO: 5403 - RNA, 17 nt, Artificial Sequence
  Synthetic
gagagcugucagucaga

SEQ ID NO: 5404 - RNA, 17 nt, Artificial Sequence
  Synthetic
ggagagcugucagucag

SEQ ID NO: 5405 - RNA, 17 nt, Artificial Sequence
  Synthetic
gggagagcugucaguca

SEQ ID NO: 5406 - RNA, 17 nt, Artificial Sequence
  Synthetic
agggagagcugucaguc

SEQ ID NO: 5407 - RNA, 17 nt, Artificial Sequence
  Synthetic
cagggagagcugucagu

SEQ ID NO: 5408 - RNA, 17 nt, Artificial Sequence
  Synthetic
gcagggagagcugucag

SEQ ID NO: 5409 - RNA, 17 nt, Artificial Sequence
  Synthetic
agcagggagagcuguca

SEQ ID NO: 5410 - RNA, 17 nt, Artificial Sequence
  Synthetic
gagcagggagagcuguc

SEQ ID NO: 5411 - RNA, 17 nt, Artificial Sequence
  Synthetic
ggagcagggagagcugu

SEQ ID NO: 5412 - RNA, 17 nt, Artificial Sequence
  Synthetic
aggagcagggagagcug

SEQ ID NO: 5413 - RNA, 17 nt, Artificial Sequence
  Synthetic
gaggagcagggagagcu

SEQ ID NO: 5414 - DNA, 17 bp, Artificial Sequence
  Synthetic
ggaggagcagggagagc

SEQ ID NO: 5415 - DNA, 17 bp, Artificial Sequence
  Synthetic
gggaggagcagggagag

SEQ ID NO: 5416 - DNA, 17 bp, Artificial Sequence
  Synthetic
agggaggagcagggaga

SEQ ID NO: 5417 - DNA, 17 bp, Artificial Sequence
  Synthetic
cagggaggagcagggag

SEQ ID NO: 5418 - DNA, 17 bp, Artificial Sequence
  Synthetic
gcagggaggagcaggga

SEQ ID NO: 5419 - RNA, 17 nt, Artificial Sequence
  Synthetic
ugcagggaggagcaggg

SEQ ID NO: 5420 - RNA, 17 nt, Artificial Sequence
  Synthetic
cugcagggaggagcagg

SEQ ID NO: 5421 - RNA, 17 nt, Artificial Sequence
  Synthetic
acugcagggaggagcag

SEQ ID NO: 5422 - RNA, 17 nt, Artificial Sequence
  Synthetic
cacugcagggaggagca

SEQ ID NO: 5423 - RNA, 17 nt, Artificial Sequence
  Synthetic
ucacugcagggaggagc

SEQ ID NO: 5424 - RNA, 17 nt, Artificial Sequence
  Synthetic
gucacugcagggaggag

SEQ ID NO: 5425 - RNA, 17 nt, Artificial Sequence
  Synthetic
ggucacugcagggagga

SEQ ID NO: 5426 - RNA, 17 nt, Artificial Sequence
  Synthetic
aggucacugcagggagg

SEQ ID NO: 5427 - RNA, 17 nt, Artificial Sequence
  Synthetic
aaggucacugcagggag

SEQ ID NO: 5428 - RNA, 17 nt, Artificial Sequence
  Synthetic
aaaggucacugcaggga

SEQ ID NO: 5429 - RNA, 17 nt, Artificial Sequence
  Synthetic
gaaaggucacugcaggg

SEQ ID NO: 5430 - RNA, 17 nt, Artificial Sequence
  Synthetic
ggaaaggucacugcagg

SEQ ID NO: 5431 - RNA, 17 nt, Artificial Sequence
  Synthetic
gggaaaggucacugcag

SEQ ID NO: 5432 - RNA, 17 nt, Artificial Sequence
  Synthetic
agggaaaggucacugca

SEQ ID NO: 5433 - RNA, 17 nt, Artificial Sequence
  Synthetic
gagggaaaggucacugc

SEQ ID NO: 5434 - RNA, 17 nt, Artificial Sequence
  Synthetic
agagggaaaggucacug

SEQ ID NO: 5435 - RNA, 17 nt, Artificial Sequence
  Synthetic
cagagggaaaggucacu

SEQ ID NO: 5436 - RNA, 17 nt, Artificial Sequence
  Synthetic
ucagagggaaaggucac

SEQ ID NO: 5437 - RNA, 17 nt, Artificial Sequence
  Synthetic
gaggucagagggaaagg

SEQ ID NO: 5438 - RNA, 17 nt, Artificial Sequence
  Synthetic
ugaggucagagggaaag

SEQ ID NO: 5439 - RNA, 17 nt, Artificial Sequence
  Synthetic
augaggucagagggaaa

SEQ ID NO: 5440 - RNA, 17 nt, Artificial Sequence
  Synthetic
caugaggucagagggaa

SEQ ID NO: 5441 - RNA, 17 nt, Artificial Sequence
  Synthetic
acaugaggucagaggga

SEQ ID NO: 5442 - RNA, 17 nt, Artificial Sequence
  Synthetic
cacaugaggucagaggg

SEQ ID NO: 5443 - RNA, 17 nt, Artificial Sequence
  Synthetic
gcacaugaggucagagg

SEQ ID NO: 5444 - RNA, 17 nt, Artificial Sequence
  Synthetic
cgcacaugaggucagag

SEQ ID NO: 5445 - RNA, 17 nt, Artificial Sequence
  Synthetic
acgcacaugaggucaga

SEQ ID NO: 5446 - RNA, 17 nt, Artificial Sequence
  Synthetic
cacgcacaugaggucag

SEQ ID NO: 5447 - RNA, 17 nt, Artificial Sequence
  Synthetic
ccacgcacaugagguca

SEQ ID NO: 5448 - RNA, 17 nt, Artificial Sequence
  Synthetic
uccacgcacaugagguc

SEQ ID NO: 5449 - RNA, 17 nt, Artificial Sequence
  Synthetic
auccacgcacaugaggu

SEQ ID NO: 5450 - RNA, 17 nt, Artificial Sequence
  Synthetic
cauccacgcacaugagg

SEQ ID NO: 5451 - RNA, 17 nt, Artificial Sequence
  Synthetic
acauccacgcacaugag

SEQ ID NO: 5452 - RNA, 17 nt, Artificial Sequence
  Synthetic
gacauccacgcacauga

SEQ ID NO: 5453 - RNA, 17 nt, Artificial Sequence
  Synthetic
ugacauccacgcacaug

SEQ ID NO: 5454 - RNA, 17 nt, Artificial Sequence
  Synthetic
uugacauccacgcacau

SEQ ID NO: 5455 - RNA, 17 nt, Artificial Sequence
  Synthetic
cuugacauccacgcaca

SEQ ID NO: 5456 - RNA, 17 nt, Artificial Sequence
  Synthetic
gcuugacauccacgcac

SEQ ID NO: 5457 - RNA, 17 nt, Artificial Sequence
  Synthetic
agcuugacauccacgca

SEQ ID NO: 5458 - RNA, 17 nt, Artificial Sequence
  Synthetic
gagcuugacauccacgc

SEQ ID NO: 5459 - RNA, 17 nt, Artificial Sequence
  Synthetic
ugagcuugacauccacg

SEQ ID NO: 5460 - RNA, 17 nt, Artificial Sequence
  Synthetic
augagcuugacauccac

SEQ ID NO: 5461 - RNA, 17 nt, Artificial Sequence
  Synthetic
gaugagcuugacaucca

SEQ ID NO: 5462 - RNA, 17 nt, Artificial Sequence
  Synthetic
agaugagcuugacaucc

SEQ ID NO: 5463 - RNA, 17 nt, Artificial Sequence
  Synthetic
gagaugagcuugacauc

SEQ ID NO: 5464 - RNA, 17 nt, Artificial Sequence
  Synthetic
ggagaugagcuugacau

SEQ ID NO: 5465 - RNA, 17 nt, Artificial Sequence
  Synthetic
gggagaugagcuugaca

SEQ ID NO: 5466 - RNA, 17 nt, Artificial Sequence
  Synthetic
ggggagaugagcuugac

SEQ ID NO: 5467 - RNA, 17 nt, Artificial Sequence
  Synthetic
gggggagaugagcuuga

SEQ ID NO: 5468 - RNA, 17 nt, Artificial Sequence
  Synthetic
ggggggagaugagcuug

SEQ ID NO: 5469 - RNA, 17 nt, Artificial Sequence
  Synthetic
uggggggagaugagcuu

SEQ ID NO: 5470 - RNA, 17 nt, Artificial Sequence
  Synthetic
cuggggggagaugagcu

SEQ ID NO: 5471 - RNA, 17 nt, Artificial Sequence
  Synthetic
ccuggggggagaugagc

SEQ ID NO: 5472 - RNA, 17 nt, Artificial Sequence
  Synthetic
uccuggggggagaugag

SEQ ID NO: 5473 - RNA, 17 nt, Artificial Sequence
  Synthetic
guccuggggggagauga

SEQ ID NO: 5474 - RNA, 17 nt, Artificial Sequence
  Synthetic
aguccuggggggagaug

SEQ ID NO: 5475 - RNA, 17 nt, Artificial Sequence
  Synthetic
caguccuggggggagau

SEQ ID NO: 5476 - RNA, 17 nt, Artificial Sequence
  Synthetic
gcaguccuggggggaga

SEQ ID NO: 5477 - RNA, 17 nt, Artificial Sequence
  Synthetic
ugcaguccuggggggag

SEQ ID NO: 5478 - RNA, 17 nt, Artificial Sequence
  Synthetic
gugcaguccugggggga

SEQ ID NO: 5479 - RNA, 17 nt, Artificial Sequence
  Synthetic
cgugcaguccugggggg

SEQ ID NO: 5480 - RNA, 17 nt, Artificial Sequence
  Synthetic
ucgugcaguccuggggg

SEQ ID NO: 5481 - RNA, 17 nt, Artificial Sequence
  Synthetic
uucgugcaguccugggg

SEQ ID NO: 5482 - RNA, 17 nt, Artificial Sequence
  Synthetic
cuucgugcaguccuggg

SEQ ID NO: 5483 - RNA, 17 nt, Artificial Sequence
  Synthetic
ccuucgugcaguccugg

SEQ ID NO: 5484 - RNA, 17 nt, Artificial Sequence
  Synthetic
accuucgugcaguccug

SEQ ID NO: 5485 - RNA, 17 nt, Artificial Sequence
  Synthetic
aaccuucgugcaguccu

SEQ ID NO: 5486 - RNA, 17 nt, Artificial Sequence
  Synthetic
aaaccuucgugcagucc

SEQ ID NO: 5487 - RNA, 17 nt, Artificial Sequence
  Synthetic
uaaaccuucgugcaguc

SEQ ID NO: 5488 - RNA, 17 nt, Artificial Sequence
  Synthetic
guaaaccuucgugcagu

SEQ ID NO: 5489 - RNA, 17 nt, Artificial Sequence
  Synthetic
uguaaaccuucgugcag

SEQ ID NO: 5490 - RNA, 17 nt, Artificial Sequence
  Synthetic
uuguaaaccuucgugca

SEQ ID NO: 5491 - RNA, 17 nt, Artificial Sequence
  Synthetic
cuuguaaaccuucgugc

SEQ ID NO: 5492 - RNA, 17 nt, Artificial Sequence
  Synthetic
ccuuguaaaccuucgug

SEQ ID NO: 5493 - RNA, 17 nt, Artificial Sequence
  Synthetic
uccuuguaaaccuucgu

SEQ ID NO: 5494 - RNA, 17 nt, Artificial Sequence
  Synthetic
guccuuguaaaccuucg

SEQ ID NO: 5495 - RNA, 17 nt, Artificial Sequence
  Synthetic
aguccuuguaaaccuuc

SEQ ID NO: 5496 - RNA, 17 nt, Artificial Sequence
  Synthetic
aaguccuuguaaaccuu

SEQ ID NO: 5497 - RNA, 17 nt, Artificial Sequence
  Synthetic
uaaguccuuguaaaccu

SEQ ID NO: 5498 - RNA, 17 nt, Artificial Sequence
  Synthetic
guaaguccuuguaaacc

SEQ ID NO: 5499 - RNA, 17 nt, Artificial Sequence
  Synthetic
aguaaguccuuguaaac

SEQ ID NO: 5500 - RNA, 17 nt, Artificial Sequence
  Synthetic
caguaaguccuuguaaa

SEQ ID NO: 5501 - RNA, 17 nt, Artificial Sequence
  Synthetic
ccaguaaguccuuguaa

SEQ ID NO: 5502 - RNA, 17 nt, Artificial Sequence
  Synthetic
uccaguaaguccuugua

SEQ ID NO: 5503 - RNA, 17 nt, Artificial Sequence
  Synthetic
uuccaguaaguccuugu

SEQ ID NO: 5504 - RNA, 17 nt, Artificial Sequence
  Synthetic
uuuccaguaaguccuug

SEQ ID NO: 5505 - RNA, 17 nt, Artificial Sequence
  Synthetic
uuuuccaguaaguccuu

SEQ ID NO: 5506 - RNA, 17 nt, Artificial Sequence
  Synthetic
auuuuccaguaaguccu

SEQ ID NO: 5507 - RNA, 17 nt, Artificial Sequence
  Synthetic
aauuuuccaguaagucc

SEQ ID NO: 5508 - RNA, 17 nt, Artificial Sequence
  Synthetic
gaauuuuccaguaaguc

SEQ ID NO: 5509 - RNA, 17 nt, Artificial Sequence
  Synthetic
ggaauuuuccaguaagu

SEQ ID NO: 5510 - RNA, 17 nt, Artificial Sequence
  Synthetic
uggaauuuuccaguaag

SEQ ID NO: 5511 - RNA, 17 nt, Artificial Sequence
  Synthetic
auggaauuuuccaguaa

SEQ ID NO: 5512 - RNA, 17 nt, Artificial Sequence
  Synthetic
cauggaauuuuccagua

SEQ ID NO: 5513 - RNA, 17 nt, Artificial Sequence
  Synthetic
gcauggaauuuuccagu

SEQ ID NO: 5514 - RNA, 17 nt, Artificial Sequence
  Synthetic
agcauggaauuuuccag

SEQ ID NO: 5515 - RNA, 17 nt, Artificial Sequence
  Synthetic
cagcauggaauuuucca

SEQ ID NO: 5516 - RNA, 17 nt, Artificial Sequence
  Synthetic
acagcauggaauuuucc

SEQ ID NO: 5517 - RNA, 17 nt, Artificial Sequence
  Synthetic
cacagcauggaauuuuc

SEQ ID NO: 5518 - RNA, 17 nt, Artificial Sequence
  Synthetic
gcacagcauggaauuuu

SEQ ID NO: 5519 - RNA, 17 nt, Artificial Sequence
  Synthetic
cgcacagcauggaauuu

SEQ ID NO: 5520 - RNA, 17 nt, Artificial Sequence
  Synthetic
gcgcacagcauggaauu

SEQ ID NO: 5521 - RNA, 17 nt, Artificial Sequence
  Synthetic
agcgcacagcauggaau

SEQ ID NO: 5522 - RNA, 17 nt, Artificial Sequence
  Synthetic
cagcgcacagcauggaa

SEQ ID NO: 5523 - RNA, 17 nt, Artificial Sequence
  Synthetic
ccagcgcacagcaugga

SEQ ID NO: 5524 - RNA, 17 nt, Artificial Sequence
  Synthetic
gggaugccagcgcacag

SEQ ID NO: 5525 - RNA, 17 nt, Artificial Sequence
  Synthetic
ggggaugccagcgcaca

SEQ ID NO: 5526 - RNA, 17 nt, Artificial Sequence
  Synthetic
cggggaugccagcgcac

SEQ ID NO: 5527 - RNA, 17 nt, Artificial Sequence
  Synthetic
ucggggaugccagcgca

SEQ ID NO: 5528 - RNA, 17 nt, Artificial Sequence
  Synthetic
gucggggaugccagcgc

SEQ ID NO: 5529 - RNA, 17 nt, Artificial Sequence
  Synthetic
agucggggaugccagcg

SEQ ID NO: 5530 - RNA, 17 nt, Artificial Sequence
  Synthetic
gagucggggaugccagc

SEQ ID NO: 5531 - RNA, 17 nt, Artificial Sequence
  Synthetic
ggagucggggaugccag

SEQ ID NO: 5532 - RNA, 17 nt, Artificial Sequence
  Synthetic
uggagucggggaugcca

SEQ ID NO: 5533 - RNA, 17 nt, Artificial Sequence
  Synthetic
uuggagucggggaugcc

SEQ ID NO: 5534 - RNA, 17 nt, Artificial Sequence
  Synthetic
cuuggagucggggaugc

SEQ ID NO: 5535 - RNA, 17 nt, Artificial Sequence
  Synthetic
ucuuggagucggggaug

SEQ ID NO: 5536 - RNA, 17 nt, Artificial Sequence
  Synthetic
uucuuggagucggggau

SEQ ID NO: 5537 - RNA, 17 nt, Artificial Sequence
  Synthetic
uuucuuggagucgggga

SEQ ID NO: 5538 - RNA, 17 nt, Artificial Sequence
  Synthetic
uuuucuuggagucgggg

SEQ ID NO: 5539 - RNA, 17 nt, Artificial Sequence
  Synthetic
uuuuucuuggagucggg

SEQ ID NO: 5540 - RNA, 17 nt, Artificial Sequence
  Synthetic
guuuuucuuggagucgg

SEQ ID NO: 5541 - RNA, 17 nt, Artificial Sequence
  Synthetic
cguuuuucuuggagucg

SEQ ID NO: 5542 - RNA, 17 nt, Artificial Sequence
  Synthetic
gcguuuuucuuggaguc

SEQ ID NO: 5543 - RNA, 17 nt, Artificial Sequence
  Synthetic
ggcguuuuucuuggagu

SEQ ID NO: 5544 - RNA, 17 nt, Artificial Sequence
  Synthetic
aggcguuuuucuuggag

SEQ ID NO: 5545 - RNA, 17 nt, Artificial Sequence
  Synthetic
caggcguuuuucuugga

SEQ ID NO: 5546 - RNA, 17 nt, Artificial Sequence
  Synthetic
gcaggcguuuuucuugg

SEQ ID NO: 5547 - RNA, 17 nt, Artificial Sequence
  Synthetic
ugcaggcguuuuucuug

SEQ ID NO: 5548 - RNA, 17 nt, Artificial Sequence
  Synthetic
uugcaggcguuuuucuu

SEQ ID NO: 5549 - RNA, 17 nt, Artificial Sequence
  Synthetic
auugcaggcguuuuucu

SEQ ID NO: 5550 - RNA, 17 nt, Artificial Sequence
  Synthetic
cauugcaggcguuuuuc

SEQ ID NO: 5551 - RNA, 17 nt, Artificial Sequence
  Synthetic
acauugcaggcguuuuu

SEQ ID NO: 5552 - RNA, 17 nt, Artificial Sequence
  Synthetic
cacauugcaggcguuuu

SEQ ID NO: 5553 - RNA, 17 nt, Artificial Sequence
  Synthetic
ucacauugcaggcguuu

SEQ ID NO: 5554 - RNA, 17 nt, Artificial Sequence
  Synthetic
cucacauugcaggcguu

SEQ ID NO: 5555 - RNA, 17 nt, Artificial Sequence
  Synthetic
ucucacauugcaggcgu

SEQ ID NO: 5556 - RNA, 17 nt, Artificial Sequence
  Synthetic
gucucacauugcaggcg

SEQ ID NO: 5557 - RNA, 17 nt, Artificial Sequence
  Synthetic
ggucucacauugcaggc

SEQ ID NO: 5558 - RNA, 17 nt, Artificial Sequence
  Synthetic
gggucucacauugcagg

SEQ ID NO: 5559 - RNA, 17 nt, Artificial Sequence
  Synthetic
agggucucacauugcag

SEQ ID NO: 5560 - RNA, 17 nt, Artificial Sequence
  Synthetic
gagggucucacauugca

SEQ ID NO: 5561 - RNA, 17 nt, Artificial Sequence
  Synthetic
ggagggucucacauugc

SEQ ID NO: 5562 - RNA, 17 nt, Artificial Sequence
  Synthetic
gggagggucucacauug

SEQ ID NO: 5563 - RNA, 17 nt, Artificial Sequence
  Synthetic
ggggagggucucacauu

SEQ ID NO: 5564 - RNA, 17 nt, Artificial Sequence
  Synthetic
gggggagggucucacau

SEQ ID NO: 5565 - RNA, 17 nt, Artificial Sequence
  Synthetic
ggggggagggucucaca

SEQ ID NO: 5566 - RNA, 17 nt, Artificial Sequence
  Synthetic
gggggggagggucucac

SEQ ID NO: 5567 - RNA, 17 nt, Artificial Sequence
  Synthetic
ugggggggagggucuca

SEQ ID NO: 5568 - RNA, 17 nt, Artificial Sequence
  Synthetic
uugggggggagggucuc

SEQ ID NO: 5569 - RNA, 17 nt, Artificial Sequence
  Synthetic
auugggggggagggucu

SEQ ID NO: 5570 - RNA, 17 nt, Artificial Sequence
  Synthetic
aauugggggggaggguc

SEQ ID NO: 5571 - RNA, 17 nt, Artificial Sequence
  Synthetic
gaauugggggggagggu

SEQ ID NO: 5572 - RNA, 17 nt, Artificial Sequence
  Synthetic
ggaauugggggggaggg

SEQ ID NO: 5573 - RNA, 17 nt, Artificial Sequence
  Synthetic
aggaauugggggggagg

SEQ ID NO: 5574 - RNA, 17 nt, Artificial Sequence
  Synthetic
gaggaauugggggggag

SEQ ID NO: 5575 - RNA, 17 nt, Artificial Sequence
  Synthetic
ggaggaauuggggggga

SEQ ID NO: 5576 - RNA, 17 nt, Artificial Sequence
  Synthetic
gggaggaauuggggggg

SEQ ID NO: 5577 - RNA, 17 nt, Artificial Sequence
  Synthetic
ggggaggaauugggggg

SEQ ID NO: 5578 - RNA, 17 nt, Artificial Sequence
  Synthetic
uggggaggaauuggggg

SEQ ID NO: 5579 - RNA, 17 nt, Artificial Sequence
  Synthetic
cuggggaggaauugggg

SEQ ID NO: 5580 - RNA, 17 nt, Artificial Sequence
  Synthetic
acuggggaggaauuggg

SEQ ID NO: 5581 - RNA, 17 nt, Artificial Sequence
  Synthetic
gacuggggaggaauugg

SEQ ID NO: 5582 - RNA, 17 nt, Artificial Sequence
  Synthetic
ggacuggggaggaauug

SEQ ID NO: 5583 - RNA, 17 nt, Artificial Sequence
  Synthetic
aggacuggggaggaauu

SEQ ID NO: 5584 - RNA, 17 nt, Artificial Sequence
  Synthetic
caggacuggggaggaau

SEQ ID NO: 5585 - RNA, 17 nt, Artificial Sequence
  Synthetic
ccaggacuggggaggaa

SEQ ID NO: 5586 - RNA, 17 nt, Artificial Sequence
  Synthetic
cccaggacuggggagga

SEQ ID NO: 5587 - RNA, 17 nt, Artificial Sequence
  Synthetic
acccaggacuggggagg

SEQ ID NO: 5588 - RNA, 17 nt, Artificial Sequence
  Synthetic
uacccaggacuggggag

SEQ ID NO: 5589 - RNA, 17 nt, Artificial Sequence
  Synthetic
guacccaggacugggga

SEQ ID NO: 5590 - RNA, 17 nt, Artificial Sequence
  Synthetic
gguacccaggacugggg

SEQ ID NO: 5591 - RNA, 17 nt, Artificial Sequence
  Synthetic
ggguacccaggacuggg

SEQ ID NO: 5592 - RNA, 17 nt, Artificial Sequence
  Synthetic
aggguacccaggacugg

SEQ ID NO: 5593 - RNA, 17 nt, Artificial Sequence
  Synthetic
caggguacccaggacug

SEQ ID NO: 5594 - RNA, 17 nt, Artificial Sequence
  Synthetic
acaggguacccaggacu

SEQ ID NO: 5595 - RNA, 17 nt, Artificial Sequence
  Synthetic
gacaggguacccaggac

SEQ ID NO: 5596 - RNA, 17 nt, Artificial Sequence
  Synthetic
agacaggguacccagga

SEQ ID NO: 5597 - RNA, 17 nt, Artificial Sequence
  Synthetic
cagacaggguacccagg

SEQ ID NO: 5598 - RNA, 17 nt, Artificial Sequence
  Synthetic
gcagacaggguacccag

SEQ ID NO: 5599 - RNA, 17 nt, Artificial Sequence
  Synthetic
ugcagacaggguaccca

SEQ ID NO: 5600 - RNA, 17 nt, Artificial Sequence
  Synthetic
augcagacaggguaccc

SEQ ID NO: 5601 - RNA, 17 nt, Artificial Sequence
  Synthetic
caugcagacaggguacc

SEQ ID NO: 5602 - RNA, 17 nt, Artificial Sequence
  Synthetic
gcaugcagacaggguac

SEQ ID NO: 5603 - RNA, 17 nt, Artificial Sequence
  Synthetic
ggcaugcagacagggua

SEQ ID NO: 5604 - RNA, 17 nt, Artificial Sequence
  Synthetic
gggcaugcagacagggu

SEQ ID NO: 5605 - RNA, 17 nt, Artificial Sequence
  Synthetic
ggggcaugcagacaggg

SEQ ID NO: 5606 - RNA, 17 nt, Artificial Sequence
  Synthetic
uggggcaugcagacagg

SEQ ID NO: 5607 - RNA, 17 nt, Artificial Sequence
  Synthetic
cuggggcaugcagacag

SEQ ID NO: 5608 - RNA, 17 nt, Artificial Sequence
  Synthetic
ccuggggcaugcagaca

SEQ ID NO: 5609 - RNA, 17 nt, Artificial Sequence
  Synthetic
cccuggggcaugcagac

SEQ ID NO: 5610 - RNA, 17 nt, Artificial Sequence
  Synthetic
ucccuggggcaugcaga

SEQ ID NO: 5611 - RNA, 17 nt, Artificial Sequence
  Synthetic
gucccuggggcaugcag

SEQ ID NO: 5612 - RNA, 17 nt, Artificial Sequence
  Synthetic
ugucccuggggcaugca

SEQ ID NO: 5613 - RNA, 17 nt, Artificial Sequence
  Synthetic
cugucccuggggcaugc

SEQ ID NO: 5614 - RNA, 17 nt, Artificial Sequence
  Synthetic
ucugucccuggggcaug

SEQ ID NO: 5615 - RNA, 17 nt, Artificial Sequence
  Synthetic
cucugucccuggggcau

SEQ ID NO: 5616 - RNA, 17 nt, Artificial Sequence
  Synthetic
gcucugucccuggggca

SEQ ID NO: 5617 - RNA, 17 nt, Artificial Sequence
  Synthetic
agcucugucccuggggc

SEQ ID NO: 5618 - RNA, 17 nt, Artificial Sequence
  Synthetic
aagcucugucccugggg

SEQ ID NO: 5619 - RNA, 17 nt, Artificial Sequence
  Synthetic
caagcucugucccuggg

SEQ ID NO: 5620 - RNA, 17 nt, Artificial Sequence
  Synthetic
ucaagcucugucccugg

SEQ ID NO: 5621 - RNA, 17 nt, Artificial Sequence
  Synthetic
gucaagcucugucccug

SEQ ID NO: 5622 - RNA, 17 nt, Artificial Sequence
  Synthetic
ggucaagcucugucccu

SEQ ID NO: 5623 - RNA, 17 nt, Artificial Sequence
  Synthetic
gggucaagcucuguccc

SEQ ID NO: 5624 - RNA, 17 nt, Artificial Sequence
  Synthetic
cgggucaagcucugucc

SEQ ID NO: 5625 - RNA, 17 nt, Artificial Sequence
  Synthetic
ucgggucaagcucuguc

SEQ ID NO: 5626 - RNA, 17 nt, Artificial Sequence
  Synthetic
cucgggucaagcucugu

SEQ ID NO: 5627 - RNA, 17 nt, Artificial Sequence
  Synthetic
acucgggucaagcucug

SEQ ID NO: 5628 - RNA, 17 nt, Artificial Sequence
  Synthetic
cacucgggucaagcucu

SEQ ID NO: 5629 - RNA, 17 nt, Artificial Sequence
  Synthetic
ucacucgggucaagcuc

SEQ ID NO: 5630 - RNA, 17 nt, Artificial Sequence
  Synthetic
gucacucgggucaagcu

SEQ ID NO: 5631 - RNA, 17 nt, Artificial Sequence
  Synthetic
agucacucgggucaagc

SEQ ID NO: 5632 - RNA, 17 nt, Artificial Sequence
  Synthetic
cagucacucgggucaag

SEQ ID NO: 5633 - RNA, 17 nt, Artificial Sequence
  Synthetic
ccagucacucgggucaa

SEQ ID NO: 5634 - RNA, 17 nt, Artificial Sequence
  Synthetic
cccagucacucggguca

SEQ ID NO: 5635 - RNA, 17 nt, Artificial Sequence
  Synthetic
acccagucacucggguc

SEQ ID NO: 5636 - RNA, 17 nt, Artificial Sequence
  Synthetic
uacccagucacucgggu

SEQ ID NO: 5637 - RNA, 17 nt, Artificial Sequence
  Synthetic
guacccagucacucggg

SEQ ID NO: 5638 - RNA, 17 nt, Artificial Sequence
  Synthetic
gguacccagucacucgg

SEQ ID NO: 5639 - RNA, 17 nt, Artificial Sequence
  Synthetic
ugguacccagucacucg

SEQ ID NO: 5640 - RNA, 17 nt, Artificial Sequence
  Synthetic
uugguacccagucacuc

SEQ ID NO: 5641 - RNA, 17 nt, Artificial Sequence
  Synthetic
cuugguacccagucacu

SEQ ID NO: 5642 - RNA, 17 nt, Artificial Sequence
  Synthetic
gcuugguacccagucac

SEQ ID NO: 5643 - RNA, 17 nt, Artificial Sequence
  Synthetic
ggcuugguacccaguca

SEQ ID NO: 5644 - RNA, 17 nt, Artificial Sequence
  Synthetic
gggcuugguacccaguc

SEQ ID NO: 5645 - RNA, 17 nt, Artificial Sequence
  Synthetic
cgggcuugguacccagu

SEQ ID NO: 5646 - RNA, 17 nt, Artificial Sequence
  Synthetic
ccgggcuugguacccag

SEQ ID NO: 5647 - DNA, 17 bp, Artificial Sequence
  Synthetic
tgggctccaaaatcttc

SEQ ID NO: 5648 - DNA, 17 bp, Artificial Sequence
  Synthetic
ctgggctccaaaatctt

SEQ ID NO: 5649 - DNA, 17 bp, Artificial Sequence
  Synthetic
gctgggctccaaaatct

SEQ ID NO: 5650 - DNA, 17 bp, Artificial Sequence
  Synthetic
agctgggctccaaaatc

SEQ ID NO: 5651 - DNA, 17 bp, Artificial Sequence
  Synthetic
cagctgggctccaaaat

SEQ ID NO: 5652 - DNA, 17 bp, Artificial Sequence
  Synthetic
gcacacagctgggctcc

SEQ ID NO: 5653 - DNA, 17 bp, Artificial Sequence
  Synthetic
ggcacacagctgggctc

SEQ ID NO: 5654 - DNA, 17 bp, Artificial Sequence
  Synthetic
tggcacacagctgggct

SEQ ID NO: 5655 - DNA, 17 bp, Artificial Sequence
  Synthetic
ctggcacacagctgggc

SEQ ID NO: 5656 - DNA, 17 bp, Artificial Sequence
  Synthetic
gctggcacacagctggg

SEQ ID NO: 5657 - DNA, 17 bp, Artificial Sequence
  Synthetic
ggctggcacacagctgg

SEQ ID NO: 5658 - DNA, 17 bp, Artificial Sequence
  Synthetic
gggctggcacacagctg

SEQ ID NO: 5659 - DNA, 17 bp, Artificial Sequence
  Synthetic
tgggctggcacacagct

SEQ ID NO: 5660 - DNA, 17 bp, Artificial Sequence
  Synthetic
ttgggctggcacacagc

SEQ ID NO: 5661 - DNA, 17 bp, Artificial Sequence
  Synthetic
cttgggctggcacacag

SEQ ID NO: 5662 - DNA, 17 bp, Artificial Sequence
  Synthetic
acttgggctggcacaca

SEQ ID NO: 5663 - DNA, 17 bp, Artificial Sequence
  Synthetic
gacttgggctggcacac

SEQ ID NO: 5664 - DNA, 17 bp, Artificial Sequence
  Synthetic
tccgacttgggctggca

SEQ ID NO: 5665 - DNA, 17 bp, Artificial Sequence
  Synthetic
ttccgacttgggctggc

SEQ ID NO: 5666 - DNA, 17 bp, Artificial Sequence
  Synthetic
gttccgacttgggctgg

SEQ ID NO: 5667 - DNA, 17 bp, Artificial Sequence
  Synthetic
agttccgacttgggctg

SEQ ID NO: 5668 - DNA, 17 bp, Artificial Sequence
  Synthetic
aagttccgacttgggct

SEQ ID NO: 5669 - DNA, 17 bp, Artificial Sequence
  Synthetic
tccaagttccgacttgg

SEQ ID NO: 5670 - DNA, 17 bp, Artificial Sequence
  Synthetic
atccaagttccgacttg

SEQ ID NO: 5671 - DNA, 17 bp, Artificial Sequence
  Synthetic
gatccaagttccgactt

SEQ ID NO: 5672 - DNA, 17 bp, Artificial Sequence
  Synthetic
tgatccaagttccgact

SEQ ID NO: 5673 - DNA, 17 bp, Artificial Sequence
  Synthetic
gtgatccaagttccgac

SEQ ID NO: 5674 - DNA, 17 bp, Artificial Sequence
  Synthetic
tgtgatccaagttccga

SEQ ID NO: 5675 - DNA, 17 bp, Artificial Sequence
  Synthetic
atgtgatccaagttccg

SEQ ID NO: 5676 - DNA, 17 bp, Artificial Sequence
  Synthetic
gatgtgatccaagttcc

SEQ ID NO: 5677 - DNA, 17 bp, Artificial Sequence
  Synthetic
tgatgtgatccaagttc

SEQ ID NO: 5678 - DNA, 17 bp, Artificial Sequence
  Synthetic
ctgatgtgatccaagtt

SEQ ID NO: 5679 - DNA, 17 bp, Artificial Sequence
  Synthetic
tctgatgtgatccaagt

SEQ ID NO: 5680 - DNA, 17 bp, Artificial Sequence
  Synthetic
atctgatgtgatccaag

SEQ ID NO: 5681 - DNA, 17 bp, Artificial Sequence
  Synthetic
gatctgatgtgatccaa

SEQ ID NO: 5682 - DNA, 17 bp, Artificial Sequence
  Synthetic
ggatctgatgtgatcca

SEQ ID NO: 5683 - DNA, 17 bp, Artificial Sequence
  Synthetic
aggatctgatgtgatcc

SEQ ID NO: 5684 - DNA, 17 bp, Artificial Sequence
  Synthetic
gaggatctgatgtgatc

SEQ ID NO: 5685 - DNA, 17 bp, Artificial Sequence
  Synthetic
agaggatctgatgtgat

SEQ ID NO: 5686 - DNA, 17 bp, Artificial Sequence
  Synthetic
gagaggatctgatgtga

SEQ ID NO: 5687 - DNA, 17 bp, Artificial Sequence
  Synthetic
cgagaggatctgatgtg

SEQ ID NO: 5688 - DNA, 17 bp, Artificial Sequence
  Synthetic
tcgagaggatctgatgt

SEQ ID NO: 5689 - DNA, 17 bp, Artificial Sequence
  Synthetic
ctcgagaggatctgatg

SEQ ID NO: 5690 - DNA, 17 bp, Artificial Sequence
  Synthetic
gctcgagaggatctgat

SEQ ID NO: 5691 - DNA, 17 bp, Artificial Sequence
  Synthetic
agctcgagaggatctga

SEQ ID NO: 5692 - DNA, 17 bp, Artificial Sequence
  Synthetic
gagctcgagaggatctg

SEQ ID NO: 5693 - DNA, 17 bp, Artificial Sequence
  Synthetic
ggagctcgagaggatct

SEQ ID NO: 5694 - DNA, 17 bp, Artificial Sequence
  Synthetic
tggagctcgagaggatc

SEQ ID NO: 5695 - DNA, 17 bp, Artificial Sequence
  Synthetic
ctggagctcgagaggat

SEQ ID NO: 5696 - DNA, 17 bp, Artificial Sequence
  Synthetic
gctggagctcgagagga

SEQ ID NO: 5697 - DNA, 17 bp, Artificial Sequence
  Synthetic
tgctggagctcgagagg

SEQ ID NO: 5698 - DNA, 17 bp, Artificial Sequence
  Synthetic
ctgctggagctcgagag

SEQ ID NO: 5699 - DNA, 17 bp, Artificial Sequence
  Synthetic
cctgctggagctcgaga

SEQ ID NO: 5700 - DNA, 17 bp, Artificial Sequence
  Synthetic
tcctgctggagctcgag

SEQ ID NO: 5701 - DNA, 17 bp, Artificial Sequence
  Synthetic
ctcctgctggagctcga

SEQ ID NO: 5702 - DNA, 17 bp, Artificial Sequence
  Synthetic
tctcctgctggagctcg

SEQ ID NO: 5703 - DNA, 17 bp, Artificial Sequence
  Synthetic
ctctcctgctggagctc

SEQ ID NO: 5704 - DNA, 17 bp, Artificial Sequence
  Synthetic
cctctcctgctggagct

SEQ ID NO: 5705 - DNA, 17 bp, Artificial Sequence
  Synthetic
gcctctcctgctggagc

SEQ ID NO: 5706 - DNA, 17 bp, Artificial Sequence
  Synthetic
agggcctctcctgctgg

SEQ ID NO: 5707 - DNA, 17 bp, Artificial Sequence
  Synthetic
aagggcctctcctgctg

SEQ ID NO: 5708 - DNA, 17 bp, Artificial Sequence
  Synthetic
gaagggcctctcctgct

SEQ ID NO: 5709 - DNA, 17 bp, Artificial Sequence
  Synthetic
ggaagggcctctcctgc

SEQ ID NO: 5710 - DNA, 17 bp, Artificial Sequence
  Synthetic
aggaagggcctctcctg

SEQ ID NO: 5711 - DNA, 17 bp, Artificial Sequence
  Synthetic
gaggaagggcctctcct

SEQ ID NO: 5712 - DNA, 17 bp, Artificial Sequence
  Synthetic
cgaggaagggcctctcc

SEQ ID NO: 5713 - DNA, 17 bp, Artificial Sequence
  Synthetic
gcgaggaagggcctctc

SEQ ID NO: 5714 - DNA, 17 bp, Artificial Sequence
  Synthetic
ggcgaggaagggcctct

SEQ ID NO: 5715 - DNA, 17 bp, Artificial Sequence
  Synthetic
aggcgaggaagggcctc

SEQ ID NO: 5716 - DNA, 17 bp, Artificial Sequence
  Synthetic
caggcgaggaagggcct

SEQ ID NO: 5717 - DNA, 17 bp, Artificial Sequence
  Synthetic
tgccaggcgaggaaggg

SEQ ID NO: 5718 - DNA, 17 bp, Artificial Sequence
  Synthetic
ctgccaggcgaggaagg

SEQ ID NO: 5719 - DNA, 17 bp, Artificial Sequence
  Synthetic
gctgccaggcgaggaag

SEQ ID NO: 5720 - DNA, 17 bp, Artificial Sequence
  Synthetic
ggctgccaggcgaggaa

SEQ ID NO: 5721 - DNA, 17 bp, Artificial Sequence
  Synthetic
tcaggggctgccaggcg

SEQ ID NO: 5722 - DNA, 17 bp, Artificial Sequence
  Synthetic
ctcaggggctgccaggc

SEQ ID NO: 5723 - DNA, 17 bp, Artificial Sequence
  Synthetic
gctcaggggctgccagg

SEQ ID NO: 5724 - DNA, 17 bp, Artificial Sequence
  Synthetic
cgctcaggggctgccag

SEQ ID NO: 5725 - DNA, 17 bp, Artificial Sequence
  Synthetic
agccgctcaggggctgc

SEQ ID NO: 5726 - DNA, 17 bp, Artificial Sequence
  Synthetic
gagccgctcaggggctg

SEQ ID NO: 5727 - DNA, 17 bp, Artificial Sequence
  Synthetic
tgagccgctcaggggct

SEQ ID NO: 5728 - DNA, 17 bp, Artificial Sequence
  Synthetic
ctgagccgctcaggggc

SEQ ID NO: 5729 - DNA, 17 bp, Artificial Sequence
  Synthetic
gctgagccgctcagggg

SEQ ID NO: 5730 - DNA, 17 bp, Artificial Sequence
  Synthetic
tgctgagccgctcaggg

SEQ ID NO: 5731 - DNA, 17 bp, Artificial Sequence
  Synthetic
ctgctgagccgctcagg

SEQ ID NO: 5732 - DNA, 17 bp, Artificial Sequence
  Synthetic
cctgctgagccgctcag

SEQ ID NO: 5733 - DNA, 17 bp, Artificial Sequence
  Synthetic
ccctgctgagccgctca

SEQ ID NO: 5734 - DNA, 17 bp, Artificial Sequence
  Synthetic
gccctgctgagccgctc

SEQ ID NO: 5735 - DNA, 17 bp, Artificial Sequence
  Synthetic
tgccctgctgagccgct

SEQ ID NO: 5736 - DNA, 17 bp, Artificial Sequence
  Synthetic
gtgccctgctgagccgc

SEQ ID NO: 5737 - DNA, 17 bp, Artificial Sequence
  Synthetic
ggtgccctgctgagccg

SEQ ID NO: 5738 - DNA, 17 bp, Artificial Sequence
  Synthetic
tggtgccctgctgagcc

SEQ ID NO: 5739 - DNA, 17 bp, Artificial Sequence
  Synthetic
atggtgccctgctgagc

SEQ ID NO: 5740 - DNA, 17 bp, Artificial Sequence
  Synthetic
catggtgccctgctgag

SEQ ID NO: 5741 - DNA, 17 bp, Artificial Sequence
  Synthetic
ccatggtgccctgctga

SEQ ID NO: 5742 - DNA, 17 bp, Artificial Sequence
  Synthetic
gccatggtgccctgctg

SEQ ID NO: 5743 - DNA, 17 bp, Artificial Sequence
  Synthetic
tgccatggtgccctgct

SEQ ID NO: 5744 - DNA, 17 bp, Artificial Sequence
  Synthetic
ttgccatggtgccctgc

SEQ ID NO: 5745 - DNA, 17 bp, Artificial Sequence
  Synthetic
cttgccatggtgccctg

SEQ ID NO: 5746 - DNA, 17 bp, Artificial Sequence
  Synthetic
tcttgccatggtgccct

SEQ ID NO: 5747 - DNA, 17 bp, Artificial Sequence
  Synthetic
atcttgccatggtgccc

SEQ ID NO: 5748 - DNA, 17 bp, Artificial Sequence
  Synthetic
gatcttgccatggtgcc

SEQ ID NO: 5749 - DNA, 17 bp, Artificial Sequence
  Synthetic
ggatcttgccatggtgc

SEQ ID NO: 5750 - DNA, 17 bp, Artificial Sequence
  Synthetic
gggatcttgccatggtg

SEQ ID NO: 5751 - DNA, 17 bp, Artificial Sequence
  Synthetic
agggatcttgccatggt

SEQ ID NO: 5752 - DNA, 17 bp, Artificial Sequence
  Synthetic
aagggatcttgccatgg

SEQ ID NO: 5753 - DNA, 17 bp, Artificial Sequence
  Synthetic
gaagggatcttgccatg

SEQ ID NO: 5754 - DNA, 17 bp, Artificial Sequence
  Synthetic
agaagggatcttgccat

SEQ ID NO: 5755 - DNA, 17 bp, Artificial Sequence
  Synthetic
aggagaagggatcttgc

SEQ ID NO: 5756 - DNA, 17 bp, Artificial Sequence
  Synthetic
caggagaagggatcttg

SEQ ID NO: 5757 - DNA, 17 bp, Artificial Sequence
  Synthetic
gcaggagaagggatctt

SEQ ID NO: 5758 - DNA, 17 bp, Artificial Sequence
  Synthetic
ggcaggagaagggatct

SEQ ID NO: 5759 - DNA, 17 bp, Artificial Sequence
  Synthetic
gggcaggagaagggatc

SEQ ID NO: 5760 - DNA, 17 bp, Artificial Sequence
  Synthetic
ggggcaggagaagggat

SEQ ID NO: 5761 - DNA, 17 bp, Artificial Sequence
  Synthetic
tgcaggggcaggagaag

SEQ ID NO: 5762 - DNA, 17 bp, Artificial Sequence
  Synthetic
ctgcaggggcaggagaa

SEQ ID NO: 5763 - DNA, 17 bp, Artificial Sequence
  Synthetic
tctgcaggggcaggaga

SEQ ID NO: 5764 - DNA, 17 bp, Artificial Sequence
  Synthetic
atctgcaggggcaggag

SEQ ID NO: 5765 - DNA, 17 bp, Artificial Sequence
  Synthetic
gatctgcaggggcagga

SEQ ID NO: 5766 - DNA, 17 bp, Artificial Sequence
  Synthetic
agatctgcaggggcagg

SEQ ID NO: 5767 - DNA, 17 bp, Artificial Sequence
  Synthetic
taagatctgcaggggca

SEQ ID NO: 5768 - DNA, 17 bp, Artificial Sequence
  Synthetic
gtaagatctgcaggggc

SEQ ID NO: 5769 - DNA, 17 bp, Artificial Sequence
  Synthetic
agtaagatctgcagggg

SEQ ID NO: 5770 - DNA, 17 bp, Artificial Sequence
  Synthetic
cagtaagatctgcaggg

SEQ ID NO: 5771 - DNA, 17 bp, Artificial Sequence
  Synthetic
tagcagtaagatctgca

SEQ ID NO: 5772 - DNA, 17 bp, Artificial Sequence
  Synthetic
atagcagtaagatctgc

SEQ ID NO: 5773 - DNA, 17 bp, Artificial Sequence
  Synthetic
gatagcagtaagatctg

SEQ ID NO: 5774 - DNA, 17 bp, Artificial Sequence
  Synthetic
ggatagcagtaagatct

SEQ ID NO: 5775 - DNA, 17 bp, Artificial Sequence
  Synthetic
aggatagcagtaagatc

SEQ ID NO: 5776 - DNA, 17 bp, Artificial Sequence
  Synthetic
aaggatagcagtaagat

SEQ ID NO: 5777 - DNA, 17 bp, Artificial Sequence
  Synthetic
taaggatagcagtaaga

SEQ ID NO: 5778 - DNA, 17 bp, Artificial Sequence
  Synthetic
ctaaggatagcagtaag

SEQ ID NO: 5779 - DNA, 17 bp, Artificial Sequence
  Synthetic
gctaaggatagcagtaa

SEQ ID NO: 5780 - DNA, 17 bp, Artificial Sequence
  Synthetic
ggctaaggatagcagta

SEQ ID NO: 5781 - DNA, 17 bp, Artificial Sequence
  Synthetic
aggctaaggatagcagt

SEQ ID NO: 5782 - DNA, 17 bp, Artificial Sequence
  Synthetic
tccaaggctaaggatag

SEQ ID NO: 5783 - DNA, 17 bp, Artificial Sequence
  Synthetic
ttccaaggctaaggata

SEQ ID NO: 5784 - DNA, 17 bp, Artificial Sequence
  Synthetic
tttccaaggctaaggat

SEQ ID NO: 5785 - DNA, 17 bp, Artificial Sequence
  Synthetic
gtttccaaggctaagga

SEQ ID NO: 5786 - DNA, 17 bp, Artificial Sequence
  Synthetic
agtttccaaggctaagg

SEQ ID NO: 5787 - DNA, 17 bp, Artificial Sequence
  Synthetic
cagtttccaaggctaag

SEQ ID NO: 5788 - DNA, 17 bp, Artificial Sequence
  Synthetic
gcagtttccaaggctaa

SEQ ID NO: 5789 - DNA, 17 bp, Artificial Sequence
  Synthetic
tgcagtttccaaggcta

SEQ ID NO: 5790 - DNA, 17 bp, Artificial Sequence
  Synthetic
ctgcagtttccaaggct

SEQ ID NO: 5791 - DNA, 17 bp, Artificial Sequence
  Synthetic
cctgcagtttccaaggc

SEQ ID NO: 5792 - DNA, 17 bp, Artificial Sequence
  Synthetic
tcctgcagtttccaagg

SEQ ID NO: 5793 - DNA, 17 bp, Artificial Sequence
  Synthetic
ctcctgcagtttccaag

SEQ ID NO: 5794 - DNA, 17 bp, Artificial Sequence
  Synthetic
tctcctgcagtttccaa

SEQ ID NO: 5795 - DNA, 17 bp, Artificial Sequence
  Synthetic
ttctcctgcagtttcca

SEQ ID NO: 5796 - DNA, 17 bp, Artificial Sequence
  Synthetic
cttctcctgcagtttcc

SEQ ID NO: 5797 - DNA, 17 bp, Artificial Sequence
  Synthetic
tcttctcctgcagtttc

SEQ ID NO: 5798 - DNA, 17 bp, Artificial Sequence
  Synthetic
ttcttctcctgcagttt

SEQ ID NO: 5799 - DNA, 17 bp, Artificial Sequence
  Synthetic
cttcttctcctgcagtt

SEQ ID NO: 5800 - DNA, 17 bp, Artificial Sequence
  Synthetic
gcttcttctcctgcagt

SEQ ID NO: 5801 - DNA, 17 bp, Artificial Sequence
  Synthetic
ggcttcttctcctgcag

SEQ ID NO: 5802 - DNA, 17 bp, Artificial Sequence
  Synthetic
tgggcttcttctcctgc

SEQ ID NO: 5803 - DNA, 17 bp, Artificial Sequence
  Synthetic
ctgggcttcttctcctg

SEQ ID NO: 5804 - DNA, 17 bp, Artificial Sequence
  Synthetic
cctgggcttcttctcct

SEQ ID NO: 5805 - DNA, 17 bp, Artificial Sequence
  Synthetic
ccctgggcttcttctcc

SEQ ID NO: 5806 - DNA, 17 bp, Artificial Sequence
  Synthetic
accctgggcttcttctc

SEQ ID NO: 5807 - DNA, 17 bp, Artificial Sequence
  Synthetic
caccctgggcttcttct

SEQ ID NO: 5808 - DNA, 17 bp, Artificial Sequence
  Synthetic
tcaccctgggcttcttc

SEQ ID NO: 5809 - DNA, 17 bp, Artificial Sequence
  Synthetic
gtcaccctgggcttctt

SEQ ID NO: 5810 - DNA, 17 bp, Artificial Sequence
  Synthetic
tgtcaccctgggcttct

SEQ ID NO: 5811 - DNA, 17 bp, Artificial Sequence
  Synthetic
ttgtcaccctgggcttc

SEQ ID NO: 5812 - DNA, 17 bp, Artificial Sequence
  Synthetic
cttgtcaccctgggctt

SEQ ID NO: 5813 - DNA, 17 bp, Artificial Sequence
  Synthetic
tcttgtcaccctgggct

SEQ ID NO: 5814 - DNA, 17 bp, Artificial Sequence
  Synthetic
atcttgtcaccctgggc

SEQ ID NO: 5815 - DNA, 17 bp, Artificial Sequence
  Synthetic
aatcttgtcaccctggg

SEQ ID NO: 5816 - DNA, 17 bp, Artificial Sequence
  Synthetic
taatcttgtcaccctgg

SEQ ID NO: 5817 - DNA, 17 bp, Artificial Sequence
  Synthetic
ataatcttgtcaccctg

SEQ ID NO: 5818 - DNA, 17 bp, Artificial Sequence
  Synthetic
aataatcttgtcaccct

SEQ ID NO: 5819 - DNA, 17 bp, Artificial Sequence
  Synthetic
caataatcttgtcaccc

SEQ ID NO: 5820 - DNA, 17 bp, Artificial Sequence
  Synthetic
tcaataatcttgtcacc

SEQ ID NO: 5821 - DNA, 17 bp, Artificial Sequence
  Synthetic
atcaataatcttgtcac

SEQ ID NO: 5822 - DNA, 17 bp, Artificial Sequence
  Synthetic
catcaataatcttgtca

SEQ ID NO: 5823 - DNA, 17 bp, Artificial Sequence
  Synthetic
ccatcaataatcttgtc

SEQ ID NO: 5824 - DNA, 17 bp, Artificial Sequence
  Synthetic
gccatcaataatcttgt

SEQ ID NO: 5825 - DNA, 17 bp, Artificial Sequence
  Synthetic
cgccatcaataatcttg

SEQ ID NO: 5826 - DNA, 17 bp, Artificial Sequence
  Synthetic
gcgccatcaataatctt

SEQ ID NO: 5827 - DNA, 17 bp, Artificial Sequence
  Synthetic
ggcgccatcaataatct

SEQ ID NO: 5828 - DNA, 17 bp, Artificial Sequence
  Synthetic
gggcgccatcaataatc

SEQ ID NO: 5829 - DNA, 17 bp, Artificial Sequence
  Synthetic
ggggcgccatcaataat

SEQ ID NO: 5830 - DNA, 17 bp, Artificial Sequence
  Synthetic
tggggcgccatcaataa

SEQ ID NO: 5831 - DNA, 17 bp, Artificial Sequence
  Synthetic
atggggcgccatcaata

SEQ ID NO: 5832 - DNA, 17 bp, Artificial Sequence
  Synthetic
catggggcgccatcaat

SEQ ID NO: 5833 - DNA, 17 bp, Artificial Sequence
  Synthetic
acatggggcgccatcaa

SEQ ID NO: 5834 - DNA, 17 bp, Artificial Sequence
  Synthetic
cacatggggcgccatca

SEQ ID NO: 5835 - DNA, 17 bp, Artificial Sequence
  Synthetic
gcacatggggcgccatc

SEQ ID NO: 5836 - DNA, 17 bp, Artificial Sequence
  Synthetic
tgcacatggggcgccat

SEQ ID NO: 5837 - DNA, 17 bp, Artificial Sequence
  Synthetic
ttgcacatggggcgcca

SEQ ID NO: 5838 - DNA, 17 bp, Artificial Sequence
  Synthetic
cttgcacatggggcgcc

SEQ ID NO: 5839 - DNA, 17 bp, Artificial Sequence
  Synthetic
tcttgcacatggggcgc

SEQ ID NO: 5840 - DNA, 17 bp, Artificial Sequence
  Synthetic
ctcttgcacatggggcg

SEQ ID NO: 5841 - DNA, 17 bp, Artificial Sequence
  Synthetic
cctcttgcacatggggc

SEQ ID NO: 5842 - DNA, 17 bp, Artificial Sequence
  Synthetic
gcctcttgcacatgggg

SEQ ID NO: 5843 - DNA, 17 bp, Artificial Sequence
  Synthetic
gagcctcttgcacatgg

SEQ ID NO: 5844 - DNA, 17 bp, Artificial Sequence
  Synthetic
ggagcctcttgcacatg

SEQ ID NO: 5845 - DNA, 17 bp, Artificial Sequence
  Synthetic
gggagcctcttgcacat

SEQ ID NO: 5846 - DNA, 17 bp, Artificial Sequence
  Synthetic
tgggagcctcttgcaca

SEQ ID NO: 5847 - DNA, 17 bp, Artificial Sequence
  Synthetic
gtgggagcctcttgcac

SEQ ID NO: 5848 - DNA, 17 bp, Artificial Sequence
  Synthetic
ggtgggagcctcttgca

SEQ ID NO: 5849 - DNA, 17 bp, Artificial Sequence
  Synthetic
gggtgggagcctcttgc

SEQ ID NO: 5850 - DNA, 17 bp, Artificial Sequence
  Synthetic
tgggtgggagcctcttg

SEQ ID NO: 5851 - DNA, 17 bp, Artificial Sequence
  Synthetic
atgggtgggagcctctt

SEQ ID NO: 5852 - DNA, 17 bp, Artificial Sequence
  Synthetic
catgggtgggagcctct

SEQ ID NO: 5853 - DNA, 17 bp, Artificial Sequence
  Synthetic
ccatgggtgggagcctc

SEQ ID NO: 5854 - DNA, 17 bp, Artificial Sequence
  Synthetic
gccatgggtgggagcct

SEQ ID NO: 5855 - DNA, 17 bp, Artificial Sequence
  Synthetic
tgccatgggtgggagcc

SEQ ID NO: 5856 - DNA, 17 bp, Artificial Sequence
  Synthetic
ctgccatgggtgggagc

SEQ ID NO: 5857 - DNA, 17 bp, Artificial Sequence
  Synthetic
cctgccatgggtgggag

SEQ ID NO: 5858 - DNA, 17 bp, Artificial Sequence
  Synthetic
acctgccatgggtggga

SEQ ID NO: 5859 - DNA, 17 bp, Artificial Sequence
  Synthetic
ccacctgccatgggtgg

SEQ ID NO: 5860 - DNA, 17 bp, Artificial Sequence
  Synthetic
gccacctgccatgggtg

SEQ ID NO: 5861 - DNA, 17 bp, Artificial Sequence
  Synthetic
ggccacctgccatgggt

SEQ ID NO: 5862 - DNA, 17 bp, Artificial Sequence
  Synthetic
agggccacctgccatgg

SEQ ID NO: 5863 - DNA, 17 bp, Artificial Sequence
  Synthetic
cagggccacctgccatg

SEQ ID NO: 5864 - DNA, 17 bp, Artificial Sequence
  Synthetic
gcagggccacctgccat

SEQ ID NO: 5865 - DNA, 17 bp, Artificial Sequence
  Synthetic
tgagcagggccacctgc

SEQ ID NO: 5866 - DNA, 17 bp, Artificial Sequence
  Synthetic
ctgagcagggccacctg

SEQ ID NO: 5867 - DNA, 17 bp, Artificial Sequence
  Synthetic
actgagcagggccacct

SEQ ID NO: 5868 - DNA, 17 bp, Artificial Sequence
  Synthetic
cactgagcagggccacc

SEQ ID NO: 5869 - DNA, 17 bp, Artificial Sequence
  Synthetic
tgccactgagcagggcc

SEQ ID NO: 5870 - DNA, 17 bp, Artificial Sequence
  Synthetic
ttgccactgagcagggc

SEQ ID NO: 5871 - DNA, 17 bp, Artificial Sequence
  Synthetic
attgccactgagcaggg

SEQ ID NO: 5872 - DNA, 17 bp, Artificial Sequence
  Synthetic
gattgccactgagcagg

SEQ ID NO: 5873 - DNA, 17 bp, Artificial Sequence
  Synthetic
tgattgccactgagcag

SEQ ID NO: 5874 - DNA, 17 bp, Artificial Sequence
  Synthetic
ctgattgccactgagca

SEQ ID NO: 5875 - DNA, 17 bp, Artificial Sequence
  Synthetic
gctgattgccactgagc

SEQ ID NO: 5876 - DNA, 17 bp, Artificial Sequence
  Synthetic
agctgattgccactgag

SEQ ID NO: 5877 - DNA, 17 bp, Artificial Sequence
  Synthetic
gagctgattgccactga

SEQ ID NO: 5878 - DNA, 17 bp, Artificial Sequence
  Synthetic
ggagctgattgccactg

SEQ ID NO: 5879 - DNA, 17 bp, Artificial Sequence
  Synthetic
tggagctgattgccact

SEQ ID NO: 5880 - DNA, 17 bp, Artificial Sequence
  Synthetic
gtggagctgattgccac

SEQ ID NO: 5881 - DNA, 17 bp, Artificial Sequence
  Synthetic
agtggagctgattgcca

SEQ ID NO: 5882 - DNA, 17 bp, Artificial Sequence
  Synthetic
cagtggagctgattgcc

SEQ ID NO: 5883 - DNA, 17 bp, Artificial Sequence
  Synthetic
gcagtggagctgattgc

SEQ ID NO: 5884 - DNA, 17 bp, Artificial Sequence
  Synthetic
cgcagtggagctgattg

SEQ ID NO: 5885 - DNA, 17 bp, Artificial Sequence
  Synthetic
ccgcagtggagctgatt

SEQ ID NO: 5886 - DNA, 17 bp, Artificial Sequence
  Synthetic
tccgcagtggagctgat

SEQ ID NO: 5887 - DNA, 17 bp, Artificial Sequence
  Synthetic
ctccgcagtggagctga

SEQ ID NO: 5888 - DNA, 17 bp, Artificial Sequence
  Synthetic
cctccgcagtggagctg

SEQ ID NO: 5889 - DNA, 17 bp, Artificial Sequence
  Synthetic
gcctccgcagtggagct

SEQ ID NO: 5890 - DNA, 17 bp, Artificial Sequence
  Synthetic
ggacgcctccgcagtgg

SEQ ID NO: 5891 - DNA, 17 bp, Artificial Sequence
  Synthetic
aggacgcctccgcagtg

SEQ ID NO: 5892 - DNA, 17 bp, Artificial Sequence
  Synthetic
caggacgcctccgcagt

SEQ ID NO: 5893 - DNA, 17 bp, Artificial Sequence
  Synthetic
tgaccaggacgcctccg

SEQ ID NO: 5894 - DNA, 17 bp, Artificial Sequence
  Synthetic
ttgaccaggacgcctcc

SEQ ID NO: 5895 - DNA, 17 bp, Artificial Sequence
  Synthetic
attgaccaggacgcctc

SEQ ID NO: 5896 - DNA, 17 bp, Artificial Sequence
  Synthetic
cattgaccaggacgcct

SEQ ID NO: 5897 - DNA, 17 bp, Artificial Sequence
  Synthetic
tcattgaccaggacgcc

SEQ ID NO: 5898 - DNA, 17 bp, Artificial Sequence
  Synthetic
ctcattgaccaggacgc

SEQ ID NO: 5899 - DNA, 17 bp, Artificial Sequence
  Synthetic
gctcattgaccaggacg

SEQ ID NO: 5900 - DNA, 17 bp, Artificial Sequence
  Synthetic
cgctcattgaccaggac

SEQ ID NO: 5901 - DNA, 17 bp, Artificial Sequence
  Synthetic
cacccagcgctcattga

SEQ ID NO: 5902 - DNA, 17 bp, Artificial Sequence
  Synthetic
gcacccagcgctcattg

SEQ ID NO: 5903 - DNA, 17 bp, Artificial Sequence
  Synthetic
agcacccagcgctcatt

SEQ ID NO: 5904 - DNA, 17 bp, Artificial Sequence
  Synthetic
gagcacccagcgctcat

SEQ ID NO: 5905 - DNA, 17 bp, Artificial Sequence
  Synthetic
tgagcacccagcgctca

SEQ ID NO: 5906 - DNA, 17 bp, Artificial Sequence
  Synthetic
gtgagcacccagcgctc

SEQ ID NO: 5907 - DNA, 17 bp, Artificial Sequence
  Synthetic
agtgagcacccagcgct

SEQ ID NO: 5908 - DNA, 17 bp, Artificial Sequence
  Synthetic
cagtgagcacccagcgc

SEQ ID NO: 5909 - DNA, 17 bp, Artificial Sequence
  Synthetic
tgggcggcagtgagcac

SEQ ID NO: 5910 - DNA, 17 bp, Artificial Sequence
  Synthetic
gtgggcggcagtgagca

SEQ ID NO: 5911 - DNA, 17 bp, Artificial Sequence
  Synthetic
agtgggcggcagtgagc

SEQ ID NO: 5912 - DNA, 17 bp, Artificial Sequence
  Synthetic
cagtgggcggcagtgag

SEQ ID NO: 5913 - DNA, 17 bp, Artificial Sequence
  Synthetic
gcagtgggcggcagtga

SEQ ID NO: 5914 - DNA, 17 bp, Artificial Sequence
  Synthetic
tgcagtgggcggcagtg

SEQ ID NO: 5915 - DNA, 17 bp, Artificial Sequence
  Synthetic
ttgcagtgggcggcagt

SEQ ID NO: 5916 - DNA, 17 bp, Artificial Sequence
  Synthetic
cttgcagtgggcggcag

SEQ ID NO: 5917 - DNA, 17 bp, Artificial Sequence
  Synthetic
tcttgcagtgggcggca

SEQ ID NO: 5918 - DNA, 17 bp, Artificial Sequence
  Synthetic
atcttgcagtgggcggc

SEQ ID NO: 5919 - DNA, 17 bp, Artificial Sequence
  Synthetic
catcttgcagtgggcgg

SEQ ID NO: 5920 - DNA, 17 bp, Artificial Sequence
  Synthetic
tcatcttgcagtgggcg

SEQ ID NO: 5921 - DNA, 17 bp, Artificial Sequence
  Synthetic
ttcatcttgcagtgggc

SEQ ID NO: 5922 - DNA, 17 bp, Artificial Sequence
  Synthetic
attcatcttgcagtggg

SEQ ID NO: 5923 - DNA, 17 bp, Artificial Sequence
  Synthetic
cattcatcttgcagtgg

SEQ ID NO: 5924 - DNA, 17 bp, Artificial Sequence
  Synthetic
tcattcatcttgcagtg

SEQ ID NO: 5925 - DNA, 17 bp, Artificial Sequence
  Synthetic
ctcattcatcttgcagt

SEQ ID NO: 5926 - DNA, 17 bp, Artificial Sequence
  Synthetic
actcattcatcttgcag

SEQ ID NO: 5927 - DNA, 17 bp, Artificial Sequence
  Synthetic
tactcattcatcttgca

SEQ ID NO: 5928 - DNA, 17 bp, Artificial Sequence
  Synthetic
gtactcattcatcttgc

SEQ ID NO: 5929 - DNA, 17 bp, Artificial Sequence
  Synthetic
tgtactcattcatcttg

SEQ ID NO: 5930 - DNA, 17 bp, Artificial Sequence
  Synthetic
gtgtactcattcatctt

SEQ ID NO: 5931 - DNA, 17 bp, Artificial Sequence
  Synthetic
ggtgtactcattcatct

SEQ ID NO: 5932 - DNA, 17 bp, Artificial Sequence
  Synthetic
cggtgtactcattcatc

SEQ ID NO: 5933 - DNA, 17 bp, Artificial Sequence
  Synthetic
acggtgtactcattcat

SEQ ID NO: 5934 - DNA, 17 bp, Artificial Sequence
  Synthetic
cacggtgtactcattca

SEQ ID NO: 5935 - DNA, 17 bp, Artificial Sequence
  Synthetic
gcacggtgtactcattc

SEQ ID NO: 5936 - DNA, 17 bp, Artificial Sequence
  Synthetic
tgcacggtgtactcatt

SEQ ID NO: 5937 - DNA, 17 bp, Artificial Sequence
  Synthetic
gtgcacggtgtactcat

SEQ ID NO: 5938 - DNA, 17 bp, Artificial Sequence
  Synthetic
ggtgcacggtgtactca

SEQ ID NO: 5939 - DNA, 17 bp, Artificial Sequence
  Synthetic
aggtgcacggtgtactc

SEQ ID NO: 5940 - DNA, 17 bp, Artificial Sequence
  Synthetic
caggtgcacggtgtact

SEQ ID NO: 5941 - DNA, 17 bp, Artificial Sequence
  Synthetic
ccaggtgcacggtgtac

SEQ ID NO: 5942 - DNA, 17 bp, Artificial Sequence
  Synthetic
cccaggtgcacggtgta

SEQ ID NO: 5943 - DNA, 17 bp, Artificial Sequence
  Synthetic
gcccaggtgcacggtgt

SEQ ID NO: 5944 - DNA, 17 bp, Artificial Sequence
  Synthetic
tgcccaggtgcacggtg

SEQ ID NO: 5945 - DNA, 17 bp, Artificial Sequence
  Synthetic
ctgcccaggtgcacggt

SEQ ID NO: 5946 - DNA, 17 bp, Artificial Sequence
  Synthetic
actgcccaggtgcacgg

SEQ ID NO: 5947 - DNA, 17 bp, Artificial Sequence
  Synthetic
cactgcccaggtgcacg

SEQ ID NO: 5948 - DNA, 17 bp, Artificial Sequence
  Synthetic
tcactgcccaggtgcac

SEQ ID NO: 5949 - DNA, 17 bp, Artificial Sequence
  Synthetic
atcactgcccaggtgca

SEQ ID NO: 5950 - DNA, 17 bp, Artificial Sequence
  Synthetic
tatcactgcccaggtgc

SEQ ID NO: 5951 - DNA, 17 bp, Artificial Sequence
  Synthetic
gtatcactgcccaggtg

SEQ ID NO: 5952 - DNA, 17 bp, Artificial Sequence
  Synthetic
cgtatcactgcccaggt

SEQ ID NO: 5953 - DNA, 17 bp, Artificial Sequence
  Synthetic
gcgtatcactgcccagg

SEQ ID NO: 5954 - DNA, 17 bp, Artificial Sequence
  Synthetic
gcccagcgtatcactgc

SEQ ID NO: 5955 - DNA, 17 bp, Artificial Sequence
  Synthetic
cgcccagcgtatcactg

SEQ ID NO: 5956 - DNA, 17 bp, Artificial Sequence
  Synthetic
tcgcccagcgtatcact

SEQ ID NO: 5957 - DNA, 17 bp, Artificial Sequence
  Synthetic
gtcgcccagcgtatcac

SEQ ID NO: 5958 - DNA, 17 bp, Artificial Sequence
  Synthetic
tgtcgcccagcgtatca

SEQ ID NO: 5959 - DNA, 17 bp, Artificial Sequence
  Synthetic
ctgtcgcccagcgtatc

SEQ ID NO: 5960 - DNA, 17 bp, Artificial Sequence
  Synthetic
cctgtcgcccagcgtat

SEQ ID NO: 5961 - DNA, 17 bp, Artificial Sequence
  Synthetic
tcctgtcgcccagcgta

SEQ ID NO: 5962 - DNA, 17 bp, Artificial Sequence
  Synthetic
ctcctgtcgcccagcgt

SEQ ID NO: 5963 - DNA, 17 bp, Artificial Sequence
  Synthetic
tctcctgtcgcccagcg

SEQ ID NO: 5964 - DNA, 17 bp, Artificial Sequence
  Synthetic
ctctcctgtcgcccagc

SEQ ID NO: 5965 - DNA, 17 bp, Artificial Sequence
  Synthetic
gctctcctgtcgcccag

SEQ ID NO: 5966 - DNA, 17 bp, Artificial Sequence
  Synthetic
agctctcctgtcgccca

SEQ ID NO: 5967 - DNA, 17 bp, Artificial Sequence
  Synthetic
tgagctctcctgtcgcc

SEQ ID NO: 5968 - DNA, 17 bp, Artificial Sequence
  Synthetic
ctgagctctcctgtcgc

SEQ ID NO: 5969 - DNA, 17 bp, Artificial Sequence
  Synthetic
tctgagctctcctgtcg

SEQ ID NO: 5970 - DNA, 17 bp, Artificial Sequence
  Synthetic
ctctgagctctcctgtc

SEQ ID NO: 5971 - DNA, 17 bp, Artificial Sequence
  Synthetic
cctctgagctctcctgt

SEQ ID NO: 5972 - DNA, 17 bp, Artificial Sequence
  Synthetic
tcctctgagctctcctg

SEQ ID NO: 5973 - DNA, 17 bp, Artificial Sequence
  Synthetic
atcctctgagctctcct

SEQ ID NO: 5974 - DNA, 17 bp, Artificial Sequence
  Synthetic
gatcctctgagctctcc

SEQ ID NO: 5975 - DNA, 17 bp, Artificial Sequence
  Synthetic
tgatcctctgagctctc

SEQ ID NO: 5976 - DNA, 17 bp, Artificial Sequence
  Synthetic
ttgatcctctgagctct

SEQ ID NO: 5977 - DNA, 17 bp, Artificial Sequence
  Synthetic
cttgatcctctgagctc

SEQ ID NO: 5978 - DNA, 17 bp, Artificial Sequence
  Synthetic
ccttgatcctctgagct

SEQ ID NO: 5979 - DNA, 17 bp, Artificial Sequence
  Synthetic
gccttgatcctctgagc

SEQ ID NO: 5980 - DNA, 17 bp, Artificial Sequence
  Synthetic
aggccttgatcctctga

SEQ ID NO: 5981 - DNA, 17 bp, Artificial Sequence
  Synthetic
gaggccttgatcctctg

SEQ ID NO: 5982 - DNA, 17 bp, Artificial Sequence
  Synthetic
cgaggccttgatcctct

SEQ ID NO: 5983 - DNA, 17 bp, Artificial Sequence
  Synthetic
tcgaggccttgatcctc

SEQ ID NO: 5984 - DNA, 17 bp, Artificial Sequence
  Synthetic
ttcgaggccttgatcct

SEQ ID NO: 5985 - DNA, 17 bp, Artificial Sequence
  Synthetic
cttcgaggccttgatcc

SEQ ID NO: 5986 - DNA, 17 bp, Artificial Sequence
  Synthetic
acttcgaggccttgatc

SEQ ID NO: 5987 - DNA, 17 bp, Artificial Sequence
  Synthetic
gacttcgaggccttgat

SEQ ID NO: 5988 - DNA, 17 bp, Artificial Sequence
  Synthetic
tgacttcgaggccttga

SEQ ID NO: 5989 - DNA, 17 bp, Artificial Sequence
  Synthetic
atgacttcgaggccttg

SEQ ID NO: 5990 - DNA, 17 bp, Artificial Sequence
  Synthetic
aatgacttcgaggcctt

SEQ ID NO: 5991 - DNA, 17 bp, Artificial Sequence
  Synthetic
gaatgacttcgaggcct

SEQ ID NO: 5992 - DNA, 17 bp, Artificial Sequence
  Synthetic
tggcggaatgacttcga

SEQ ID NO: 5993 - DNA, 17 bp, Artificial Sequence
  Synthetic
gtggcggaatgacttcg

SEQ ID NO: 5994 - DNA, 17 bp, Artificial Sequence
  Synthetic
ggtggcggaatgacttc

SEQ ID NO: 5995 - DNA, 17 bp, Artificial Sequence
  Synthetic
gggtggcggaatgactt

SEQ ID NO: 5996 - DNA, 17 bp, Artificial Sequence
  Synthetic
ggggtggcggaatgact

SEQ ID NO: 5997 - DNA, 17 bp, Artificial Sequence
  Synthetic
ccggggtggcggaatga

SEQ ID NO: 5998 - DNA, 17 bp, Artificial Sequence
  Synthetic
gccggggtggcggaatg

SEQ ID NO: 5999 - DNA, 17 bp, Artificial Sequence
  Synthetic
agccggggtggcggaat

SEQ ID NO: 6000 - DNA, 17 bp, Artificial Sequence
  Synthetic
tagccggggtggcggaa

SEQ ID NO: 6001 - DNA, 17 bp, Artificial Sequence
  Synthetic
gtagccggggtggcgga

SEQ ID NO: 6002 - DNA, 17 bp, Artificial Sequence
  Synthetic
agtagccggggtggcgg

SEQ ID NO: 6003 - DNA, 17 bp, Artificial Sequence
  Synthetic
gagtagccggggtggcg

SEQ ID NO: 6004 - DNA, 17 bp, Artificial Sequence
  Synthetic
tggagtagccggggtgg

SEQ ID NO: 6005 - DNA, 17 bp, Artificial Sequence
  Synthetic
gtggagtagccggggtg

SEQ ID NO: 6006 - DNA, 17 bp, Artificial Sequence
  Synthetic
tgtggagtagccggggt

SEQ ID NO: 6007 - DNA, 17 bp, Artificial Sequence
  Synthetic
gtgtggagtagccgggg

SEQ ID NO: 6008 - DNA, 17 bp, Artificial Sequence
  Synthetic
tgtgtggagtagccggg

SEQ ID NO: 6009 - DNA, 17 bp, Artificial Sequence
  Synthetic
ctgtgtggagtagccgg

SEQ ID NO: 6010 - DNA, 17 bp, Artificial Sequence
  Synthetic
tctgtgtggagtagccg

SEQ ID NO: 6011 - DNA, 17 bp, Artificial Sequence
  Synthetic
gtctgtgtggagtagcc

SEQ ID NO: 6012 - DNA, 17 bp, Artificial Sequence
  Synthetic
ggtctgtgtggagtagc

SEQ ID NO: 6013 - DNA, 17 bp, Artificial Sequence
  Synthetic
gggtctgtgtggagtag

SEQ ID NO: 6014 - DNA, 17 bp, Artificial Sequence
  Synthetic
tgggtctgtgtggagta

SEQ ID NO: 6015 - DNA, 17 bp, Artificial Sequence
  Synthetic
atgggtctgtgtggagt

SEQ ID NO: 6016 - DNA, 17 bp, Artificial Sequence
  Synthetic
catgggtctgtgtggag

SEQ ID NO: 6017 - DNA, 17 bp, Artificial Sequence
  Synthetic
acatgggtctgtgtgga

SEQ ID NO: 6018 - DNA, 17 bp, Artificial Sequence
  Synthetic
aacatgggtctgtgtgg

SEQ ID NO: 6019 - DNA, 17 bp, Artificial Sequence
  Synthetic
taacatgggtctgtgtg

SEQ ID NO: 6020 - DNA, 17 bp, Artificial Sequence
  Synthetic
ttaacatgggtctgtgt

SEQ ID NO: 6021 - DNA, 17 bp, Artificial Sequence
  Synthetic
attaacatgggtctgtg

SEQ ID NO: 6022 - DNA, 17 bp, Artificial Sequence
  Synthetic
cattaacatgggtctgt

SEQ ID NO: 6023 - DNA, 17 bp, Artificial Sequence
  Synthetic
tcattaacatgggtctg

SEQ ID NO: 6024 - DNA, 17 bp, Artificial Sequence
  Synthetic
gtcattaacatgggtct

SEQ ID NO: 6025 - DNA, 17 bp, Artificial Sequence
  Synthetic
ggtcattaacatgggtc

SEQ ID NO: 6026 - DNA, 17 bp, Artificial Sequence
  Synthetic
aggtcattaacatgggt

SEQ ID NO: 6027 - DNA, 17 bp, Artificial Sequence
  Synthetic
tgaggtcattaacatgg

SEQ ID NO: 6028 - DNA, 17 bp, Artificial Sequence
  Synthetic
atgaggtcattaacatg

SEQ ID NO: 6029 - DNA, 17 bp, Artificial Sequence
  Synthetic
catgaggtcattaacat

SEQ ID NO: 6030 - DNA, 17 bp, Artificial Sequence
  Synthetic
gcatgaggtcattaaca

SEQ ID NO: 6031 - DNA, 17 bp, Artificial Sequence
  Synthetic
gagcatgaggtcattaa

SEQ ID NO: 6032 - DNA, 17 bp, Artificial Sequence
  Synthetic
cgagcatgaggtcatta

SEQ ID NO: 6033 - DNA, 17 bp, Artificial Sequence
  Synthetic
acgagcatgaggtcatt

SEQ ID NO: 6034 - DNA, 17 bp, Artificial Sequence
  Synthetic
cacgagcatgaggtcat

SEQ ID NO: 6035 - DNA, 17 bp, Artificial Sequence
  Synthetic
tcacgagcatgaggtca

SEQ ID NO: 6036 - DNA, 17 bp, Artificial Sequence
  Synthetic
ttcacgagcatgaggtc

SEQ ID NO: 6037 - DNA, 17 bp, Artificial Sequence
  Synthetic
cttcacgagcatgaggt

SEQ ID NO: 6038 - DNA, 17 bp, Artificial Sequence
  Synthetic
gcttcacgagcatgagg

SEQ ID NO: 6039 - DNA, 17 bp, Artificial Sequence
  Synthetic
agcttcacgagcatgag

SEQ ID NO: 6040 - DNA, 17 bp, Artificial Sequence
  Synthetic
gagcttcacgagcatga

SEQ ID NO: 6041 - DNA, 17 bp, Artificial Sequence
  Synthetic
tgagcttcacgagcatg

SEQ ID NO: 6042 - DNA, 17 bp, Artificial Sequence
  Synthetic
ttgagcttcacgagcat

SEQ ID NO: 6043 - DNA, 17 bp, Artificial Sequence
  Synthetic
attgagcttcacgagca

SEQ ID NO: 6044 - DNA, 17 bp, Artificial Sequence
  Synthetic
tattgagcttcacgagc

SEQ ID NO: 6045 - DNA, 17 bp, Artificial Sequence
  Synthetic
ctattgagcttcacgag

SEQ ID NO: 6046 - DNA, 17 bp, Artificial Sequence
  Synthetic
gctattgagcttcacga

SEQ ID NO: 6047 - DNA, 17 bp, Artificial Sequence
  Synthetic
ggctattgagcttcacg

SEQ ID NO: 6048 - DNA, 17 bp, Artificial Sequence
  Synthetic
tggctattgagcttcac

SEQ ID NO: 6049 - DNA, 17 bp, Artificial Sequence
  Synthetic
ctggctattgagcttca

SEQ ID NO: 6050 - DNA, 17 bp, Artificial Sequence
  Synthetic
cctggctattgagcttc

SEQ ID NO: 6051 - DNA, 17 bp, Artificial Sequence
  Synthetic
gcctggctattgagctt

SEQ ID NO: 6052 - DNA, 17 bp, Artificial Sequence
  Synthetic
ggcctggctattgagct

SEQ ID NO: 6053 - DNA, 17 bp, Artificial Sequence
  Synthetic
tggcctggctattgagc

SEQ ID NO: 6054 - DNA, 17 bp, Artificial Sequence
  Synthetic
ctggcctggctattgag

SEQ ID NO: 6055 - DNA, 17 bp, Artificial Sequence
  Synthetic
cctggcctggctattga

SEQ ID NO: 6056 - DNA, 17 bp, Artificial Sequence
  Synthetic
gcctggcctggctattg

SEQ ID NO: 6057 - DNA, 17 bp, Artificial Sequence
  Synthetic
agcctggcctggctatt

SEQ ID NO: 6058 - DNA, 17 bp, Artificial Sequence
  Synthetic
cagcctggcctggctat

SEQ ID NO: 6059 - DNA, 17 bp, Artificial Sequence
  Synthetic
acagcctggcctggcta

SEQ ID NO: 6060 - DNA, 17 bp, Artificial Sequence
  Synthetic
gacagcctggcctggct

SEQ ID NO: 6061 - DNA, 17 bp, Artificial Sequence
  Synthetic
tgacagcctggcctggc

SEQ ID NO: 6062 - DNA, 17 bp, Artificial Sequence
  Synthetic
atgacagcctggcctgg

SEQ ID NO: 6063 - DNA, 17 bp, Artificial Sequence
  Synthetic
gatgacagcctggcctg

SEQ ID NO: 6064 - DNA, 17 bp, Artificial Sequence
  Synthetic
ggatgacagcctggcct

SEQ ID NO: 6065 - DNA, 17 bp, Artificial Sequence
  Synthetic
tggatgacagcctggcc

SEQ ID NO: 6066 - DNA, 17 bp, Artificial Sequence
  Synthetic
atggatgacagcctggc

SEQ ID NO: 6067 - DNA, 17 bp, Artificial Sequence
  Synthetic
catggatgacagcctgg

SEQ ID NO: 6068 - DNA, 17 bp, Artificial Sequence
  Synthetic
ccatggatgacagcctg

SEQ ID NO: 6069 - DNA, 17 bp, Artificial Sequence
  Synthetic
accatggatgacagcct

SEQ ID NO: 6070 - DNA, 17 bp, Artificial Sequence
  Synthetic
tcaccatggatgacagc

SEQ ID NO: 6071 - DNA, 17 bp, Artificial Sequence
  Synthetic
ttcaccatggatgacag

SEQ ID NO: 6072 - DNA, 17 bp, Artificial Sequence
  Synthetic
cttcaccatggatgaca

SEQ ID NO: 6073 - DNA, 17 bp, Artificial Sequence
  Synthetic
tcttcaccatggatgac

SEQ ID NO: 6074 - DNA, 17 bp, Artificial Sequence
  Synthetic
ttcttcaccatggatga

SEQ ID NO: 6075 - DNA, 17 bp, Artificial Sequence
  Synthetic
tttcttcaccatggatg

SEQ ID NO: 6076 - DNA, 17 bp, Artificial Sequence
  Synthetic
ctttcttcaccatggat

SEQ ID NO: 6077 - DNA, 17 bp, Artificial Sequence
  Synthetic
actttcttcaccatgga

SEQ ID NO: 6078 - DNA, 17 bp, Artificial Sequence
  Synthetic
gactttcttcaccatgg

SEQ ID NO: 6079 - DNA, 17 bp, Artificial Sequence
  Synthetic
tgactttcttcaccatg

SEQ ID NO: 6080 - DNA, 17 bp, Artificial Sequence
  Synthetic
ctgactttcttcaccat

SEQ ID NO: 6081 - DNA, 17 bp, Artificial Sequence
  Synthetic
cctgactttcttcacca

SEQ ID NO: 6082 - DNA, 17 bp, Artificial Sequence
  Synthetic
gcctgactttcttcacc

SEQ ID NO: 6083 - DNA, 17 bp, Artificial Sequence
  Synthetic
cagcctgactttcttca

SEQ ID NO: 6084 - DNA, 17 bp, Artificial Sequence
  Synthetic
gcagcctgactttcttc

SEQ ID NO: 6085 - DNA, 17 bp, Artificial Sequence
  Synthetic
ggcagcctgactttctt

SEQ ID NO: 6086 - DNA, 17 bp, Artificial Sequence
  Synthetic
gggcagcctgactttct

SEQ ID NO: 6087 - DNA, 17 bp, Artificial Sequence
  Synthetic
agggcagcctgactttc

SEQ ID NO: 6088 - DNA, 17 bp, Artificial Sequence
  Synthetic
gagggcagcctgacttt

SEQ ID NO: 6089 - DNA, 17 bp, Artificial Sequence
  Synthetic
ggagggcagcctgactt

SEQ ID NO: 6090 - DNA, 17 bp, Artificial Sequence
  Synthetic
gggagggcagcctgact

SEQ ID NO: 6091 - DNA, 17 bp, Artificial Sequence
  Synthetic
gcgggagggcagcctga

SEQ ID NO: 6092 - DNA, 17 bp, Artificial Sequence
  Synthetic
agcgggagggcagcctg

SEQ ID NO: 6093 - DNA, 17 bp, Artificial Sequence
  Synthetic
cagcgggagggcagcct

SEQ ID NO: 6094 - DNA, 17 bp, Artificial Sequence
  Synthetic
tcgcagcgggagggcag

SEQ ID NO: 6095 - DNA, 17 bp, Artificial Sequence
  Synthetic
ttcgcagcgggagggca

SEQ ID NO: 6096 - DNA, 17 bp, Artificial Sequence
  Synthetic
gttcgcagcgggagggc

SEQ ID NO: 6097 - DNA, 17 bp, Artificial Sequence
  Synthetic
ggttcgcagcgggaggg

SEQ ID NO: 6098 - DNA, 17 bp, Artificial Sequence
  Synthetic
gggttcgcagcgggagg

SEQ ID NO: 6099 - DNA, 17 bp, Artificial Sequence
  Synthetic
tccagggggttcgcagc

SEQ ID NO: 6100 - DNA, 17 bp, Artificial Sequence
  Synthetic
ttccagggggttcgcag

SEQ ID NO: 6101 - DNA, 17 bp, Artificial Sequence
  Synthetic
gttccagggggttcgca

SEQ ID NO: 6102 - DNA, 17 bp, Artificial Sequence
  Synthetic
ggttccagggggttcgc

SEQ ID NO: 6103 - DNA, 17 bp, Artificial Sequence
  Synthetic
tggttccagggggttcg

SEQ ID NO: 6104 - DNA, 17 bp, Artificial Sequence
  Synthetic
gtggttccagggggttc

SEQ ID NO: 6105 - DNA, 17 bp, Artificial Sequence
  Synthetic
ggtggttccagggggtt

SEQ ID NO: 6106 - DNA, 17 bp, Artificial Sequence
  Synthetic
aggtggttccagggggt

SEQ ID NO: 6107 - DNA, 17 bp, Artificial Sequence
  Synthetic
tacaggtggttccaggg

SEQ ID NO: 6108 - DNA, 17 bp, Artificial Sequence
  Synthetic
gtacaggtggttccagg

SEQ ID NO: 6109 - DNA, 17 bp, Artificial Sequence
  Synthetic
agtacaggtggttccag

SEQ ID NO: 6110 - DNA, 17 bp, Artificial Sequence
  Synthetic
cagtacaggtggttcca

SEQ ID NO: 6111 - DNA, 17 bp, Artificial Sequence
  Synthetic
acagtacaggtggttcc

SEQ ID NO: 6112 - DNA, 17 bp, Artificial Sequence
  Synthetic
gacagtacaggtggttc

SEQ ID NO: 6113 - DNA, 17 bp, Artificial Sequence
  Synthetic
agacagtacaggtggtt

SEQ ID NO: 6114 - DNA, 17 bp, Artificial Sequence
  Synthetic
gagacagtacaggtggt

SEQ ID NO: 6115 - DNA, 17 bp, Artificial Sequence
  Synthetic
ggagacagtacaggtgg

SEQ ID NO: 6116 - DNA, 17 bp, Artificial Sequence
  Synthetic
cggagacagtacaggtg

SEQ ID NO: 6117 - DNA, 17 bp, Artificial Sequence
  Synthetic
ccggagacagtacaggt

SEQ ID NO: 6118 - DNA, 17 bp, Artificial Sequence
  Synthetic
ccagccggagacagtac

SEQ ID NO: 6119 - DNA, 17 bp, Artificial Sequence
  Synthetic
cccagccggagacagta

SEQ ID NO: 6120 - DNA, 17 bp, Artificial Sequence
  Synthetic
ccccagccggagacagt

SEQ ID NO: 6121 - DNA, 17 bp, Artificial Sequence
  Synthetic
tgccccagccggagaca

SEQ ID NO: 6122 - DNA, 17 bp, Artificial Sequence
  Synthetic
gtgccccagccggagac

SEQ ID NO: 6123 - DNA, 17 bp, Artificial Sequence
  Synthetic
agtgccccagccggaga

SEQ ID NO: 6124 - DNA, 17 bp, Artificial Sequence
  Synthetic
tagtgccccagccggag

SEQ ID NO: 6125 - DNA, 17 bp, Artificial Sequence
  Synthetic
gtagtgccccagccgga

SEQ ID NO: 6126 - DNA, 17 bp, Artificial Sequence
  Synthetic
ggtagtgccccagccgg

SEQ ID NO: 6127 - DNA, 17 bp, Artificial Sequence
  Synthetic
tggtagtgccccagccg

SEQ ID NO: 6128 - DNA, 17 bp, Artificial Sequence
  Synthetic
gtggtagtgccccagcc

SEQ ID NO: 6129 - DNA, 17 bp, Artificial Sequence
  Synthetic
cgtggtagtgccccagc

SEQ ID NO: 6130 - DNA, 17 bp, Artificial Sequence
  Synthetic
tcgtggtagtgccccag

SEQ ID NO: 6131 - DNA, 17 bp, Artificial Sequence
  Synthetic
ctcgtggtagtgcccca

SEQ ID NO: 6132 - DNA, 17 bp, Artificial Sequence
  Synthetic
gctcgtggtagtgcccc

SEQ ID NO: 6133 - DNA, 17 bp, Artificial Sequence
  Synthetic
ggctcgtggtagtgccc

SEQ ID NO: 6134 - DNA, 17 bp, Artificial Sequence
  Synthetic
tgggctcgtggtagtgc

SEQ ID NO: 6135 - DNA, 17 bp, Artificial Sequence
  Synthetic
ctgggctcgtggtagtg

SEQ ID NO: 6136 - DNA, 17 bp, Artificial Sequence
  Synthetic
tctgggctcgtggtagt

SEQ ID NO: 6137 - DNA, 17 bp, Artificial Sequence
  Synthetic
atctgggctcgtggtag

SEQ ID NO: 6138 - DNA, 17 bp, Artificial Sequence
  Synthetic
catctgggctcgtggta

SEQ ID NO: 6139 - DNA, 17 bp, Artificial Sequence
  Synthetic
acatctgggctcgtggt

SEQ ID NO: 6140 - DNA, 17 bp, Artificial Sequence
  Synthetic
cacatctgggctcgtgg

SEQ ID NO: 6141 - DNA, 17 bp, Artificial Sequence
  Synthetic
tcacatctgggctcgtg

SEQ ID NO: 6142 - DNA, 17 bp, Artificial Sequence
  Synthetic
gtcacatctgggctcgt

SEQ ID NO: 6143 - DNA, 17 bp, Artificial Sequence
  Synthetic
ggtcacatctgggctcg

SEQ ID NO: 6144 - DNA, 17 bp, Artificial Sequence
  Synthetic
aggtcacatctgggctc

SEQ ID NO: 6145 - DNA, 17 bp, Artificial Sequence
  Synthetic
aaggtcacatctgggct

SEQ ID NO: 6146 - DNA, 17 bp, Artificial Sequence
  Synthetic
ggaaaggtcacatctgg

SEQ ID NO: 6147 - DNA, 17 bp, Artificial Sequence
  Synthetic
gggaaaggtcacatctg

SEQ ID NO: 6148 - DNA, 17 bp, Artificial Sequence
  Synthetic
agggaaaggtcacatct

SEQ ID NO: 6149 - DNA, 17 bp, Artificial Sequence
  Synthetic
gagggaaaggtcacatc

SEQ ID NO: 6150 - DNA, 17 bp, Artificial Sequence
  Synthetic
agagggaaaggtcacat

SEQ ID NO: 6151 - DNA, 17 bp, Artificial Sequence
  Synthetic
tcagagggaaaggtcac

SEQ ID NO: 6152 - DNA, 17 bp, Artificial Sequence
  Synthetic
gtcagagggaaaggtca

SEQ ID NO: 6153 - DNA, 17 bp, Artificial Sequence
  Synthetic
ggtcagagggaaaggtc

SEQ ID NO: 6154 - DNA, 17 bp, Artificial Sequence
  Synthetic
aggtcagagggaaaggt

SEQ ID NO: 6155 - DNA, 17 bp, Artificial Sequence
  Synthetic
tgaggtcagagggaaag

SEQ ID NO: 6156 - DNA, 17 bp, Artificial Sequence
  Synthetic
atgaggtcagagggaaa

SEQ ID NO: 6157 - DNA, 17 bp, Artificial Sequence
  Synthetic
catgaggtcagagggaa

SEQ ID NO: 6158 - DNA, 17 bp, Artificial Sequence
  Synthetic
acatgaggtcagaggga

SEQ ID NO: 6159 - DNA, 17 bp, Artificial Sequence
  Synthetic
ccacgcacatgaggtca

SEQ ID NO: 6160 - DNA, 17 bp, Artificial Sequence
  Synthetic
tccacgcacatgaggtc

SEQ ID NO: 6161 - DNA, 17 bp, Artificial Sequence
  Synthetic
atccacgcacatgaggt

SEQ ID NO: 6162 - DNA, 17 bp, Artificial Sequence
  Synthetic
catccacgcacatgagg

SEQ ID NO: 6163 - DNA, 17 bp, Artificial Sequence
  Synthetic
acatccacgcacatgag

SEQ ID NO: 6164 - DNA, 17 bp, Artificial Sequence
  Synthetic
gacatccacgcacatga

SEQ ID NO: 6165 - DNA, 17 bp, Artificial Sequence
  Synthetic
tgacatccacgcacatg

SEQ ID NO: 6166 - DNA, 17 bp, Artificial Sequence
  Synthetic
ttgacatccacgcacat

SEQ ID NO: 6167 - DNA, 17 bp, Artificial Sequence
  Synthetic
cttgacatccacgcaca

SEQ ID NO: 6168 - DNA, 17 bp, Artificial Sequence
  Synthetic
gcttgacatccacgcac

SEQ ID NO: 6169 - DNA, 17 bp, Artificial Sequence
  Synthetic
agcttgacatccacgca

SEQ ID NO: 6170 - DNA, 17 bp, Artificial Sequence
  Synthetic
tgagcttgacatccacg

SEQ ID NO: 6171 - DNA, 17 bp, Artificial Sequence
  Synthetic
atgagcttgacatccac

SEQ ID NO: 6172 - DNA, 17 bp, Artificial Sequence
  Synthetic
gatgagcttgacatcca

SEQ ID NO: 6173 - DNA, 17 bp, Artificial Sequence
  Synthetic
agatgagcttgacatcc

SEQ ID NO: 6174 - DNA, 17 bp, Artificial Sequence
  Synthetic
gagatgagcttgacatc

SEQ ID NO: 6175 - DNA, 17 bp, Artificial Sequence
  Synthetic
ggagatgagcttgacat

SEQ ID NO: 6176 - DNA, 17 bp, Artificial Sequence
  Synthetic
gggggagatgagcttga

SEQ ID NO: 6177 - DNA, 17 bp, Artificial Sequence
  Synthetic
ggggggagatgagcttg

SEQ ID NO: 6178 - DNA, 17 bp, Artificial Sequence
  Synthetic
tggggggagatgagctt

SEQ ID NO: 6179 - DNA, 17 bp, Artificial Sequence
  Synthetic
ctggggggagatgagct

SEQ ID NO: 6180 - DNA, 17 bp, Artificial Sequence
  Synthetic
cctggggggagatgagc

SEQ ID NO: 6181 - DNA, 17 bp, Artificial Sequence
  Synthetic
tcctggggggagatgag

SEQ ID NO: 6182 - DNA, 17 bp, Artificial Sequence
  Synthetic
gtcctggggggagatga

SEQ ID NO: 6183 - DNA, 17 bp, Artificial Sequence
  Synthetic
agtcctggggggagatg

SEQ ID NO: 6184 - DNA, 17 bp, Artificial Sequence
  Synthetic
cagtcctggggggagat

SEQ ID NO: 6185 - DNA, 17 bp, Artificial Sequence
  Synthetic
tgcagtcctggggggag

SEQ ID NO: 6186 - DNA, 17 bp, Artificial Sequence
  Synthetic
gtgcagtcctgggggga

SEQ ID NO: 6187 - DNA, 17 bp, Artificial Sequence
  Synthetic
cgtgcagtcctgggggg

SEQ ID NO: 6188 - DNA, 17 bp, Artificial Sequence
  Synthetic
tcgtgcagtcctggggg

SEQ ID NO: 6189 - DNA, 17 bp, Artificial Sequence
  Synthetic
ttcgtgcagtcctgggg

SEQ ID NO: 6190 - DNA, 17 bp, Artificial Sequence
  Synthetic
cttcgtgcagtcctggg

SEQ ID NO: 6191 - DNA, 17 bp, Artificial Sequence
  Synthetic
ccttcgtgcagtcctgg

SEQ ID NO: 6192 - DNA, 17 bp, Artificial Sequence
  Synthetic
accttcgtgcagtcctg

SEQ ID NO: 6193 - DNA, 17 bp, Artificial Sequence
  Synthetic
aaccttcgtgcagtcct

SEQ ID NO: 6194 - DNA, 17 bp, Artificial Sequence
  Synthetic
aaaccttcgtgcagtcc

SEQ ID NO: 6195 - DNA, 17 bp, Artificial Sequence
  Synthetic
taaaccttcgtgcagtc

SEQ ID NO: 6196 - DNA, 17 bp, Artificial Sequence
  Synthetic
gtaaaccttcgtgcagt

SEQ ID NO: 6197 - DNA, 17 bp, Artificial Sequence
  Synthetic
tgtaaaccttcgtgcag

SEQ ID NO: 6198 - DNA, 17 bp, Artificial Sequence
  Synthetic
ttgtaaaccttcgtgca

SEQ ID NO: 6199 - DNA, 17 bp, Artificial Sequence
  Synthetic
cttgtaaaccttcgtgc

SEQ ID NO: 6200 - DNA, 17 bp, Artificial Sequence
  Synthetic
ccttgtaaaccttcgtg

SEQ ID NO: 6201 - DNA, 17 bp, Artificial Sequence
  Synthetic
tccttgtaaaccttcgt

SEQ ID NO: 6202 - DNA, 17 bp, Artificial Sequence
  Synthetic
gtccttgtaaaccttcg

SEQ ID NO: 6203 - DNA, 17 bp, Artificial Sequence
  Synthetic
agtccttgtaaaccttc

SEQ ID NO: 6204 - DNA, 17 bp, Artificial Sequence
  Synthetic
aagtccttgtaaacctt

SEQ ID NO: 6205 - DNA, 17 bp, Artificial Sequence
  Synthetic
taagtccttgtaaacct

SEQ ID NO: 6206 - DNA, 17 bp, Artificial Sequence
  Synthetic
gtaagtccttgtaaacc

SEQ ID NO: 6207 - DNA, 17 bp, Artificial Sequence
  Synthetic
agtaagtccttgtaaac

SEQ ID NO: 6208 - DNA, 17 bp, Artificial Sequence
  Synthetic
cagtaagtccttgtaaa

SEQ ID NO: 6209 - DNA, 17 bp, Artificial Sequence
  Synthetic
ccagtaagtccttgtaa

SEQ ID NO: 6210 - DNA, 17 bp, Artificial Sequence
  Synthetic
tccagtaagtccttgta

SEQ ID NO: 6211 - DNA, 17 bp, Artificial Sequence
  Synthetic
ttccagtaagtccttgt

SEQ ID NO: 6212 - DNA, 17 bp, Artificial Sequence
  Synthetic
tttccagtaagtccttg

SEQ ID NO: 6213 - DNA, 17 bp, Artificial Sequence
  Synthetic
ttttccagtaagtcctt

SEQ ID NO: 6214 - DNA, 17 bp, Artificial Sequence
  Synthetic
attttccagtaagtcct

SEQ ID NO: 6215 - DNA, 17 bp, Artificial Sequence
  Synthetic
aattttccagtaagtcc

SEQ ID NO: 6216 - DNA, 17 bp, Artificial Sequence
  Synthetic
gaattttccagtaagtc

SEQ ID NO: 6217 - DNA, 17 bp, Artificial Sequence
  Synthetic
ggaattttccagtaagt

SEQ ID NO: 6218 - DNA, 17 bp, Artificial Sequence
  Synthetic
tggaattttccagtaag

SEQ ID NO: 6219 - DNA, 17 bp, Artificial Sequence
  Synthetic
atggaattttccagtaa

SEQ ID NO: 6220 - DNA, 17 bp, Artificial Sequence
  Synthetic
catggaattttccagta

SEQ ID NO: 6221 - DNA, 17 bp, Artificial Sequence
  Synthetic
gcatggaattttccagt

SEQ ID NO: 6222 - DNA, 17 bp, Artificial Sequence
  Synthetic
acagcatggaattttcc

SEQ ID NO: 6223 - DNA, 17 bp, Artificial Sequence
  Synthetic
cacagcatggaattttc

SEQ ID NO: 6224 - DNA, 17 bp, Artificial Sequence
  Synthetic
gcacagcatggaatttt

SEQ ID NO: 6225 - DNA, 17 bp, Artificial Sequence
  Synthetic
cgcacagcatggaattt

SEQ ID NO: 6226 - DNA, 17 bp, Artificial Sequence
  Synthetic
gcgcacagcatggaatt

SEQ ID NO: 6227 - DNA, 17 bp, Artificial Sequence
  Synthetic
agcgcacagcatggaat

SEQ ID NO: 6228 - DNA, 17 bp, Artificial Sequence
  Synthetic
gccagcgcacagcatgg

SEQ ID NO: 6229 - DNA, 17 bp, Artificial Sequence
  Synthetic
tgccagcgcacagcatg

SEQ ID NO: 6230 - DNA, 17 bp, Artificial Sequence
  Synthetic
atgccagcgcacagcat

SEQ ID NO: 6231 - DNA, 17 bp, Artificial Sequence
  Synthetic
gatgccagcgcacagca

SEQ ID NO: 6232 - DNA, 17 bp, Artificial Sequence
  Synthetic
ggatgccagcgcacagc

SEQ ID NO: 6233 - DNA, 17 bp, Artificial Sequence
  Synthetic
tcggggatgccagcgca

SEQ ID NO: 6234 - DNA, 17 bp, Artificial Sequence
  Synthetic
gtcggggatgccagcgc

SEQ ID NO: 6235 - DNA, 17 bp, Artificial Sequence
  Synthetic
agtcggggatgccagcg

SEQ ID NO: 6236 - DNA, 17 bp, Artificial Sequence
  Synthetic
gagtcggggatgccagc

SEQ ID NO: 6237 - DNA, 17 bp, Artificial Sequence
  Synthetic
tggagtcggggatgcca

SEQ ID NO: 6238 - DNA, 17 bp, Artificial Sequence
  Synthetic
ttggagtcggggatgcc

SEQ ID NO: 6239 - DNA, 17 bp, Artificial Sequence
  Synthetic
cttggagtcggggatgc

SEQ ID NO: 6240 - DNA, 17 bp, Artificial Sequence
  Synthetic
tcttggagtcggggatg

SEQ ID NO: 6241 - DNA, 17 bp, Artificial Sequence
  Synthetic
ttcttggagtcggggat

SEQ ID NO: 6242 - DNA, 17 bp, Artificial Sequence
  Synthetic
tttcttggagtcgggga

SEQ ID NO: 6243 - DNA, 17 bp, Artificial Sequence
  Synthetic
ttttcttggagtcgggg

SEQ ID NO: 6244 - DNA, 17 bp, Artificial Sequence
  Synthetic
tttttcttggagtcggg

SEQ ID NO: 6245 - DNA, 17 bp, Artificial Sequence
  Synthetic
gtttttcttggagtcgg

SEQ ID NO: 6246 - DNA, 17 bp, Artificial Sequence
  Synthetic
cgtttttcttggagtcg

SEQ ID NO: 6247 - DNA, 17 bp, Artificial Sequence
  Synthetic
gcgtttttcttggagtc

SEQ ID NO: 6248 - DNA, 17 bp, Artificial Sequence
  Synthetic
ggcgtttttcttggagt

SEQ ID NO: 6249 - DNA, 17 bp, Artificial Sequence
  Synthetic
gcaggcgtttttcttgg

SEQ ID NO: 6250 - DNA, 17 bp, Artificial Sequence
  Synthetic
tgcaggcgtttttcttg

SEQ ID NO: 6251 - DNA, 17 bp, Artificial Sequence
  Synthetic
ttgcaggcgtttttctt

SEQ ID NO: 6252 - DNA, 17 bp, Artificial Sequence
  Synthetic
attgcaggcgtttttct

SEQ ID NO: 6253 - DNA, 17 bp, Artificial Sequence
  Synthetic
cattgcaggcgtttttc

SEQ ID NO: 6254 - DNA, 17 bp, Artificial Sequence
  Synthetic
ccattgcaggcgttttt

SEQ ID NO: 6255 - DNA, 17 bp, Artificial Sequence
  Synthetic
accattgcaggcgtttt

SEQ ID NO: 6256 - DNA, 17 bp, Artificial Sequence
  Synthetic
caccattgcaggcgttt

SEQ ID NO: 6257 - DNA, 17 bp, Artificial Sequence
  Synthetic
tcaccattgcaggcgtt

SEQ ID NO: 6258 - DNA, 17 bp, Artificial Sequence
  Synthetic
gtcaccattgcaggcgt

SEQ ID NO: 6259 - DNA, 17 bp, Artificial Sequence
  Synthetic
agtcaccattgcaggcg

SEQ ID NO: 6260 - DNA, 17 bp, Artificial Sequence
  Synthetic
gagtcaccattgcaggc

SEQ ID NO: 6261 - DNA, 17 bp, Artificial Sequence
  Synthetic
tgagtcaccattgcagg

SEQ ID NO: 6262 - DNA, 17 bp, Artificial Sequence
  Synthetic
ctgagtcaccattgcag

SEQ ID NO: 6263 - DNA, 17 bp, Artificial Sequence
  Synthetic
cctgagtcaccattgca

SEQ ID NO: 6264 - DNA, 17 bp, Artificial Sequence
  Synthetic
ccctgagtcaccattgc

SEQ ID NO: 6265 - DNA, 17 bp, Artificial Sequence
  Synthetic
cccctgagtcaccattg

SEQ ID NO: 6266 - DNA, 17 bp, Artificial Sequence
  Synthetic
ccccctgagtcaccatt

SEQ ID NO: 6267 - DNA, 17 bp, Artificial Sequence
  Synthetic
tccccctgagtcaccat

SEQ ID NO: 6268 - DNA, 17 bp, Artificial Sequence
  Synthetic
gtccccctgagtcacca

SEQ ID NO: 6269 - DNA, 17 bp, Artificial Sequence
  Synthetic
ggtccccctgagtcacc

SEQ ID NO: 6270 - DNA, 17 bp, Artificial Sequence
  Synthetic
cggtccccctgagtcac

SEQ ID NO: 6271 - DNA, 17 bp, Artificial Sequence
  Synthetic
acggtccccctgagtca

SEQ ID NO: 6272 - DNA, 17 bp, Artificial Sequence
  Synthetic
aacggtccccctgagtc

SEQ ID NO: 6273 - DNA, 17 bp, Artificial Sequence
  Synthetic
caacggtccccctgagt

SEQ ID NO: 6274 - DNA, 17 bp, Artificial Sequence
  Synthetic
accaacggtccccctga

SEQ ID NO: 6275 - DNA, 17 bp, Artificial Sequence
  Synthetic
caccaacggtccccctg

SEQ ID NO: 6276 - DNA, 17 bp, Artificial Sequence
  Synthetic
acaccaacggtccccct

SEQ ID NO: 6277 - DNA, 17 bp, Artificial Sequence
  Synthetic
tgcacaccaacggtccc

SEQ ID NO: 6278 - DNA, 17 bp, Artificial Sequence
  Synthetic
ctgcacaccaacggtcc

SEQ ID NO: 6279 - DNA, 17 bp, Artificial Sequence
  Synthetic
tctgcacaccaacggtc

SEQ ID NO: 6280 - DNA, 17 bp, Artificial Sequence
  Synthetic
ctctgcacaccaacggt

SEQ ID NO: 6281 - DNA, 17 bp, Artificial Sequence
  Synthetic
cctctgcacaccaacgg

SEQ ID NO: 6282 - DNA, 17 bp, Artificial Sequence
  Synthetic
acctctgcacaccaacg

SEQ ID NO: 6283 - DNA, 17 bp, Artificial Sequence
  Synthetic
tacctctgcacaccaac

SEQ ID NO: 6284 - DNA, 17 bp, Artificial Sequence
  Synthetic
gtacctctgcacaccaa

SEQ ID NO: 6285 - DNA, 17 bp, Artificial Sequence
  Synthetic
ggtacctctgcacacca

SEQ ID NO: 6286 - DNA, 17 bp, Artificial Sequence
  Synthetic
gggtacctctgcacacc

SEQ ID NO: 6287 - DNA, 17 bp, Artificial Sequence
  Synthetic
tgcagggtacctctgca

SEQ ID NO: 6288 - DNA, 17 bp, Artificial Sequence
  Synthetic
ttgcagggtacctctgc

SEQ ID NO: 6289 - DNA, 17 bp, Artificial Sequence
  Synthetic
cttgcagggtacctctg

SEQ ID NO: 6290 - DNA, 17 bp, Artificial Sequence
  Synthetic
ccttgcagggtacctct

SEQ ID NO: 6291 - DNA, 17 bp, Artificial Sequence
  Synthetic
accttgcagggtacctc

SEQ ID NO: 6292 - DNA, 17 bp, Artificial Sequence
  Synthetic
gaccttgcagggtacct

SEQ ID NO: 6293 - DNA, 17 bp, Artificial Sequence
  Synthetic
cagaccttgcagggtac

SEQ ID NO: 6294 - DNA, 17 bp, Artificial Sequence
  Synthetic
ccagaccttgcagggta

SEQ ID NO: 6295 - DNA, 17 bp, Artificial Sequence
  Synthetic
accagaccttgcagggt

SEQ ID NO: 6296 - DNA, 17 bp, Artificial Sequence
  Synthetic
aggacaccagaccttgc

SEQ ID NO: 6297 - DNA, 17 bp, Artificial Sequence
  Synthetic
caggacaccagaccttg

SEQ ID NO: 6298 - DNA, 17 bp, Artificial Sequence
  Synthetic
ccaggacaccagacctt

SEQ ID NO: 6299 - DNA, 17 bp, Artificial Sequence
  Synthetic
cccaggacaccagacct

SEQ ID NO: 6300 - DNA, 17 bp, Artificial Sequence
  Synthetic
tccccaggacaccagac

SEQ ID NO: 6301 - DNA, 17 bp, Artificial Sequence
  Synthetic
ttccccaggacaccaga

SEQ ID NO: 6302 - DNA, 17 bp, Artificial Sequence
  Synthetic
gttccccaggacaccag

SEQ ID NO: 6303 - DNA, 17 bp, Artificial Sequence
  Synthetic
agttccccaggacacca

SEQ ID NO: 6304 - DNA, 17 bp, Artificial Sequence
  Synthetic
aagttccccaggacacc

SEQ ID NO: 6305 - DNA, 17 bp, Artificial Sequence
  Synthetic
ccgcaagggaaagttcc

SEQ ID NO: 6306 - DNA, 17 bp, Artificial Sequence
  Synthetic
gccgcaagggaaagttc

SEQ ID NO: 6307 - DNA, 17 bp, Artificial Sequence
  Synthetic
ggccgcaagggaaagtt

SEQ ID NO: 6308 - DNA, 17 bp, Artificial Sequence
  Synthetic
tggccgcaagggaaagt

SEQ ID NO: 6309 - DNA, 17 bp, Artificial Sequence
  Synthetic
ttggccgcaagggaaag

SEQ ID NO: 6310 - DNA, 17 bp, Artificial Sequence
  Synthetic
gttggccgcaagggaaa

SEQ ID NO: 6311 - DNA, 17 bp, Artificial Sequence
  Synthetic
ggttggccgcaagggaa

SEQ ID NO: 6312 - DNA, 17 bp, Artificial Sequence
  Synthetic
gggttggccgcaaggga

SEQ ID NO: 6313 - DNA, 17 bp, Artificial Sequence
  Synthetic
tgggttggccgcaaggg

SEQ ID NO: 6314 - DNA, 17 bp, Artificial Sequence
  Synthetic
ttgggttggccgcaagg

SEQ ID NO: 6315 - DNA, 17 bp, Artificial Sequence
  Synthetic
attgggttggccgcaag

SEQ ID NO: 6316 - DNA, 17 bp, Artificial Sequence
  Synthetic
cattgggttggccgcaa

SEQ ID NO: 6317 - DNA, 17 bp, Artificial Sequence
  Synthetic
tcattgggttggccgca

SEQ ID NO: 6318 - DNA, 17 bp, Artificial Sequence
  Synthetic
gtcattgggttggccgc

SEQ ID NO: 6319 - DNA, 17 bp, Artificial Sequence
  Synthetic
ggtcattgggttggccg

SEQ ID NO: 6320 - DNA, 17 bp, Artificial Sequence
  Synthetic
gggtcattgggttggcc

SEQ ID NO: 6321 - DNA, 17 bp, Artificial Sequence
  Synthetic
tgggtcattgggttggc

SEQ ID NO: 6322 - DNA, 17 bp, Artificial Sequence
  Synthetic
ctgggtcattgggttgg

SEQ ID NO: 6323 - DNA, 17 bp, Artificial Sequence
  Synthetic
cctgggtcattgggttg

SEQ ID NO: 6324 - DNA, 17 bp, Artificial Sequence
  Synthetic
tcctgggtcattgggtt

SEQ ID NO: 6325 - DNA, 17 bp, Artificial Sequence
  Synthetic
ctcctgggtcattgggt

SEQ ID NO: 6326 - DNA, 17 bp, Artificial Sequence
  Synthetic
actcctgggtcattggg

SEQ ID NO: 6327 - DNA, 17 bp, Artificial Sequence
  Synthetic
gactcctgggtcattgg

SEQ ID NO: 6328 - DNA, 17 bp, Artificial Sequence
  Synthetic
agactcctgggtcattg

SEQ ID NO: 6329 - DNA, 17 bp, Artificial Sequence
  Synthetic
tagactcctgggtcatt

SEQ ID NO: 6330 - DNA, 17 bp, Artificial Sequence
  Synthetic
gtagactcctgggtcat

SEQ ID NO: 6331 - DNA, 17 bp, Artificial Sequence
  Synthetic
tgtagactcctgggtca

SEQ ID NO: 6332 - DNA, 17 bp, Artificial Sequence
  Synthetic
gtgtagactcctgggtc

SEQ ID NO: 6333 - DNA, 17 bp, Artificial Sequence
  Synthetic
agtgtagactcctgggt

SEQ ID NO: 6334 - DNA, 17 bp, Artificial Sequence
  Synthetic
gagtgtagactcctggg

SEQ ID NO: 6335 - DNA, 17 bp, Artificial Sequence
  Synthetic
tgagtgtagactcctgg

SEQ ID NO: 6336 - DNA, 17 bp, Artificial Sequence
  Synthetic
ttgagtgtagactcctg

SEQ ID NO: 6337 - DNA, 17 bp, Artificial Sequence
  Synthetic
cttgagtgtagactcct

SEQ ID NO: 6338 - DNA, 17 bp, Artificial Sequence
  Synthetic
acttgagtgtagactcc

SEQ ID NO: 6339 - DNA, 17 bp, Artificial Sequence
  Synthetic
cacttgagtgtagactc

SEQ ID NO: 6340 - DNA, 17 bp, Artificial Sequence
  Synthetic
acacttgagtgtagact

SEQ ID NO: 6341 - DNA, 17 bp, Artificial Sequence
  Synthetic
tgcacacttgagtgtag

SEQ ID NO: 6342 - DNA, 17 bp, Artificial Sequence
  Synthetic
ttgcacacttgagtgta

SEQ ID NO: 6343 - DNA, 17 bp, Artificial Sequence
  Synthetic
cttgcacacttgagtgt

SEQ ID NO: 6344 - DNA, 17 bp, Artificial Sequence
  Synthetic
acttgcacacttgagtg

SEQ ID NO: 6345 - DNA, 17 bp, Artificial Sequence
  Synthetic
aacttgcacacttgagt

SEQ ID NO: 6346 - DNA, 17 bp, Artificial Sequence
  Synthetic
tgaacttgcacacttga

SEQ ID NO: 6347 - DNA, 17 bp, Artificial Sequence
  Synthetic
gtgaacttgcacacttg

SEQ ID NO: 6348 - DNA, 17 bp, Artificial Sequence
  Synthetic
ggtgaacttgcacactt

SEQ ID NO: 6349 - DNA, 17 bp, Artificial Sequence
  Synthetic
tggtgaacttgcacact

SEQ ID NO: 6350 - DNA, 17 bp, Artificial Sequence
  Synthetic
ttggtgaacttgcacac

SEQ ID NO: 6351 - DNA, 17 bp, Artificial Sequence
  Synthetic
cttggtgaacttgcaca

SEQ ID NO: 6352 - DNA, 17 bp, Artificial Sequence
  Synthetic
acttggtgaacttgcac

SEQ ID NO: 6353 - DNA, 17 bp, Artificial Sequence
  Synthetic
cacttggtgaacttgca

SEQ ID NO: 6354 - DNA, 17 bp, Artificial Sequence
  Synthetic
ccacttggtgaacttgc

SEQ ID NO: 6355 - DNA, 17 bp, Artificial Sequence
  Synthetic
tccacttggtgaacttg

SEQ ID NO: 6356 - DNA, 17 bp, Artificial Sequence
  Synthetic
atccacttggtgaactt

SEQ ID NO: 6357 - DNA, 17 bp, Artificial Sequence
  Synthetic
tatccacttggtgaact

SEQ ID NO: 6358 - DNA, 17 bp, Artificial Sequence
  Synthetic
ttatccacttggtgaac

SEQ ID NO: 6359 - DNA, 17 bp, Artificial Sequence
  Synthetic
tttatccacttggtgaa

SEQ ID NO: 6360 - DNA, 17 bp, Artificial Sequence
  Synthetic
atttatccacttggtga

SEQ ID NO: 6361 - DNA, 17 bp, Artificial Sequence
  Synthetic
catttatccacttggtg

SEQ ID NO: 6362 - DNA, 17 bp, Artificial Sequence
  Synthetic
tcatttatccacttggt

SEQ ID NO: 6363 - DNA, 17 bp, Artificial Sequence
  Synthetic
gtcatttatccacttgg

SEQ ID NO: 6364 - DNA, 17 bp, Artificial Sequence
  Synthetic
tgtcatttatccacttg

SEQ ID NO: 6365 - DNA, 17 bp, Artificial Sequence
  Synthetic
gtgtcatttatccactt

SEQ ID NO: 6366 - DNA, 17 bp, Artificial Sequence
  Synthetic
ggtgtcatttatccact

SEQ ID NO: 6367 - DNA, 17 bp, Artificial Sequence
  Synthetic
tggtgtcatttatccac

SEQ ID NO: 6368 - DNA, 17 bp, Artificial Sequence
  Synthetic
atggtgtcatttatcca

SEQ ID NO: 6369 - DNA, 17 bp, Artificial Sequence
  Synthetic
catggtgtcatttatcc

SEQ ID NO: 6370 - DNA, 17 bp, Artificial Sequence
  Synthetic
tcatggtgtcatttatc

SEQ ID NO: 6371 - DNA, 17 bp, Artificial Sequence
  Synthetic
ttcatggtgtcatttat

SEQ ID NO: 6372 - DNA, 17 bp, Artificial Sequence
  Synthetic
tttcatggtgtcattta

SEQ ID NO: 6373 - DNA, 17 bp, Artificial Sequence
  Synthetic
ttttcatggtgtcattt

SEQ ID NO: 6374 - DNA, 17 bp, Artificial Sequence
  Synthetic
tttttcatggtgtcatt

SEQ ID NO: 6375 - DNA, 17 bp, Artificial Sequence
  Synthetic
ctttttcatggtgtcat

SEQ ID NO: 6376 - DNA, 17 bp, Artificial Sequence
  Synthetic
gctttttcatggtgtca

SEQ ID NO: 6377 - DNA, 17 bp, Artificial Sequence
  Synthetic
tgctttttcatggtgtc

SEQ ID NO: 6378 - DNA, 17 bp, Artificial Sequence
  Synthetic
atgctttttcatggtgt

SEQ ID NO: 6379 - DNA, 17 bp, Artificial Sequence
  Synthetic
gatgctttttcatggtg

SEQ ID NO: 6380 - DNA, 17 bp, Artificial Sequence
  Synthetic
cgatgctttttcatggt

SEQ ID NO: 6381 - DNA, 17 bp, Artificial Sequence
  Synthetic
gcgatgctttttcatgg

SEQ ID NO: 6382 - DNA, 17 bp, Artificial Sequence
  Synthetic
agcgatgctttttcatg

SEQ ID NO: 6383 - DNA, 17 bp, Artificial Sequence
  Synthetic
tagcgatgctttttcat

SEQ ID NO: 6384 - DNA, 17 bp, Artificial Sequence
  Synthetic
ttagcgatgctttttca

SEQ ID NO: 6385 - DNA, 17 bp, Artificial Sequence
  Synthetic
gttagcgatgctttttc

SEQ ID NO: 6386 - DNA, 17 bp, Artificial Sequence
  Synthetic
cgttagcgatgcttttt

SEQ ID NO: 6387 - DNA, 17 bp, Artificial Sequence
  Synthetic
gcgttagcgatgctttt

SEQ ID NO: 6388 - DNA, 17 bp, Artificial Sequence
  Synthetic
ggcgttagcgatgcttt

SEQ ID NO: 6389 - DNA, 17 bp, Artificial Sequence
  Synthetic
tggcgttagcgatgctt

SEQ ID NO: 6390 - DNA, 17 bp, Artificial Sequence
  Synthetic
gtggcgttagcgatgct

SEQ ID NO: 6391 - DNA, 17 bp, Artificial Sequence
  Synthetic
tgtggcgttagcgatgc

SEQ ID NO: 6392 - DNA, 17 bp, Artificial Sequence
  Synthetic
gtgtggcgttagcgatg

SEQ ID NO: 6393 - DNA, 17 bp, Artificial Sequence
  Synthetic
agtgtggcgttagcgat

SEQ ID NO: 6394 - DNA, 17 bp, Artificial Sequence
  Synthetic
cagtgtggcgttagcga

SEQ ID NO: 6395 - DNA, 17 bp, Artificial Sequence
  Synthetic
tcagtgtggcgttagcg

SEQ ID NO: 6396 - DNA, 17 bp, Artificial Sequence
  Synthetic
ctcagtgtggcgttagc

SEQ ID NO: 6397 - DNA, 17 bp, Artificial Sequence
  Synthetic
actcagtgtggcgttag

SEQ ID NO: 6398 - DNA, 17 bp, Artificial Sequence
  Synthetic
aactcagtgtggcgtta

SEQ ID NO: 6399 - DNA, 17 bp, Artificial Sequence
  Synthetic
taactcagtgtggcgtt

SEQ ID NO: 6400 - DNA, 17 bp, Artificial Sequence
  Synthetic
ttaactcagtgtggcgt

SEQ ID NO: 6401 - DNA, 17 bp, Artificial Sequence
  Synthetic
attaactcagtgtggcg

SEQ ID NO: 6402 - DNA, 17 bp, Artificial Sequence
  Synthetic
aattaactcagtgtggc

SEQ ID NO: 6403 - DNA, 17 bp, Artificial Sequence
  Synthetic
taattaactcagtgtgg

SEQ ID NO: 6404 - DNA, 17 bp, Artificial Sequence
  Synthetic
ttaattaactcagtgtg

SEQ ID NO: 6405 - DNA, 17 bp, Artificial Sequence
  Synthetic
gttaattaactcagtgt

SEQ ID NO: 6406 - DNA, 17 bp, Artificial Sequence
  Synthetic
agttaattaactcagtg

SEQ ID NO: 6407 - DNA, 17 bp, Artificial Sequence
  Synthetic
cagttaattaactcagt

SEQ ID NO: 6408 - DNA, 17 bp, Artificial Sequence
  Synthetic
cacagttaattaactca

SEQ ID NO: 6409 - DNA, 17 bp, Artificial Sequence
  Synthetic
acacagttaattaactc

SEQ ID NO: 6410 - DNA, 17 bp, Artificial Sequence
  Synthetic
cacacagttaattaact

SEQ ID NO: 6411 - DNA, 17 bp, Artificial Sequence
  Synthetic
agcacacagttaattaa

SEQ ID NO: 6412 - DNA, 17 bp, Artificial Sequence
  Synthetic
aagcacacagttaatta

SEQ ID NO: 6413 - DNA, 17 bp, Artificial Sequence
  Synthetic
gaagcacacagttaatt

SEQ ID NO: 6414 - DNA, 17 bp, Artificial Sequence
  Synthetic
ggaagcacacagttaat

SEQ ID NO: 6415 - DNA, 17 bp, Artificial Sequence
  Synthetic
tggaagcacacagttaa

SEQ ID NO: 6416 - DNA, 17 bp, Artificial Sequence
  Synthetic
ttggaagcacacagtta

SEQ ID NO: 6417 - DNA, 17 bp, Artificial Sequence
  Synthetic
gttggaagcacacagtt

SEQ ID NO: 6418 - DNA, 17 bp, Artificial Sequence
  Synthetic
tgttggaagcacacagt

SEQ ID NO: 6419 - DNA, 17 bp, Artificial Sequence
  Synthetic
ctgttggaagcacacag

SEQ ID NO: 6420 - DNA, 17 bp, Artificial Sequence
  Synthetic
tctgttggaagcacaca

SEQ ID NO: 6421 - DNA, 17 bp, Artificial Sequence
  Synthetic
ttctgttggaagcacac

SEQ ID NO: 6422 - DNA, 17 bp, Artificial Sequence
  Synthetic
tttctgttggaagcaca

SEQ ID NO: 6423 - DNA, 17 bp, Artificial Sequence
  Synthetic
ttttctgttggaagcac

SEQ ID NO: 6424 - DNA, 17 bp, Artificial Sequence
  Synthetic
attttctgttggaagca

SEQ ID NO: 6425 - DNA, 17 bp, Artificial Sequence
  Synthetic
cattttctgttggaagc

SEQ ID NO: 6426 - DNA, 17 bp, Artificial Sequence
  Synthetic
gcattttctgttggaag

SEQ ID NO: 6427 - DNA, 17 bp, Artificial Sequence
  Synthetic
tgcattttctgttggaa

SEQ ID NO: 6428 - DNA, 17 bp, Artificial Sequence
  Synthetic
gtgcattttctgttgga

SEQ ID NO: 6429 - DNA, 17 bp, Artificial Sequence
  Synthetic
tgtgcattttctgttgg

SEQ ID NO: 6430 - DNA, 17 bp, Artificial Sequence
  Synthetic
ctgtgcattttctgttg

SEQ ID NO: 6431 - DNA, 17 bp, Artificial Sequence
  Synthetic
cctgtgcattttctgtt

SEQ ID NO: 6432 - DNA, 17 bp, Artificial Sequence
  Synthetic
tcctgtgcattttctgt

SEQ ID NO: 6433 - DNA, 17 bp, Artificial Sequence
  Synthetic
ctcctgtgcattttctg

SEQ ID NO: 6434 - DNA, 17 bp, Artificial Sequence
  Synthetic
actcctgtgcattttct

SEQ ID NO: 6435 - DNA, 17 bp, Artificial Sequence
  Synthetic
cactcctgtgcattttc

SEQ ID NO: 6436 - DNA, 17 bp, Artificial Sequence
  Synthetic
tcactcctgtgcatttt

SEQ ID NO: 6437 - DNA, 17 bp, Artificial Sequence
  Synthetic
ctcactcctgtgcattt

SEQ ID NO: 6438 - DNA, 17 bp, Artificial Sequence
  Synthetic
cctcactcctgtgcatt

SEQ ID NO: 6439 - DNA, 17 bp, Artificial Sequence
  Synthetic
tcctcactcctgtgcat

SEQ ID NO: 6440 - DNA, 17 bp, Artificial Sequence
  Synthetic
gtcctcactcctgtgca

SEQ ID NO: 6441 - DNA, 17 bp, Artificial Sequence
  Synthetic
cgtcctcactcctgtgc

SEQ ID NO: 6442 - DNA, 17 bp, Artificial Sequence
  Synthetic
gcgtcctcactcctgtg

SEQ ID NO: 6443 - DNA, 17 bp, Artificial Sequence
  Synthetic
ggcgtcctcactcctgt

SEQ ID NO: 6444 - DNA, 17 bp, Artificial Sequence
  Synthetic
cggcgtcctcactcctg

SEQ ID NO: 6445 - DNA, 17 bp, Artificial Sequence
  Synthetic
tcggcgtcctcactcct

SEQ ID NO: 6446 - DNA, 17 bp, Artificial Sequence
  Synthetic
atcggcgtcctcactcc

SEQ ID NO: 6447 - DNA, 17 bp, Artificial Sequence
  Synthetic
catcggcgtcctcactc

SEQ ID NO: 6448 - DNA, 17 bp, Artificial Sequence
  Synthetic
tcatcggcgtcctcact

SEQ ID NO: 6449 - DNA, 17 bp, Artificial Sequence
  Synthetic
gtcatcggcgtcctcac

SEQ ID NO: 6450 - DNA, 17 bp, Artificial Sequence
  Synthetic
ggtcatcggcgtcctca

SEQ ID NO: 6451 - DNA, 17 bp, Artificial Sequence
  Synthetic
aggtcatcggcgtcctc

SEQ ID NO: 6452 - DNA, 17 bp, Artificial Sequence
  Synthetic
taggtcatcggcgtcct

SEQ ID NO: 6453 - DNA, 17 bp, Artificial Sequence
  Synthetic
ataggtcatcggcgtcc

SEQ ID NO: 6454 - DNA, 17 bp, Artificial Sequence
  Synthetic
cataggtcatcggcgtc

SEQ ID NO: 6455 - DNA, 17 bp, Artificial Sequence
  Synthetic
tcataggtcatcggcgt

SEQ ID NO: 6456 - DNA, 17 bp, Artificial Sequence
  Synthetic
ttcataggtcatcggcg

SEQ ID NO: 6457 - DNA, 17 bp, Artificial Sequence
  Synthetic
cttcataggtcatcggc

SEQ ID NO: 6458 - DNA, 17 bp, Artificial Sequence
  Synthetic
acttcataggtcatcgg

SEQ ID NO: 6459 - DNA, 17 bp, Artificial Sequence
  Synthetic
gacttcataggtcatcg

SEQ ID NO: 6460 - DNA, 17 bp, Artificial Sequence
  Synthetic
tgacttcataggtcatc

SEQ ID NO: 6461 - DNA, 17 bp, Artificial Sequence
  Synthetic
ttgacttcataggtcat

SEQ ID NO: 6462 - DNA, 17 bp, Artificial Sequence
  Synthetic
tttgacttcataggtca

SEQ ID NO: 6463 - DNA, 17 bp, Artificial Sequence
  Synthetic
atttgacttcataggtc

SEQ ID NO: 6464 - DNA, 17 bp, Artificial Sequence
  Synthetic
aatttgacttcataggt

SEQ ID NO: 6465 - DNA, 17 bp, Artificial Sequence
  Synthetic
aaatttgacttcatagg

SEQ ID NO: 6466 - DNA, 17 bp, Artificial Sequence
  Synthetic
caaatttgacttcatag

SEQ ID NO: 6467 - DNA, 17 bp, Artificial Sequence
  Synthetic
tcaaatttgacttcata

SEQ ID NO: 6468 - DNA, 17 bp, Artificial Sequence
  Synthetic
gtcaaatttgacttcat

SEQ ID NO: 6469 - DNA, 17 bp, Artificial Sequence
  Synthetic
agtcaaatttgacttca

SEQ ID NO: 6470 - DNA, 17 bp, Artificial Sequence
  Synthetic
aagtcaaatttgacttc

SEQ ID NO: 6471 - DNA, 17 bp, Artificial Sequence
  Synthetic
aaagtcaaatttgactt

SEQ ID NO: 6472 - DNA, 17 bp, Artificial Sequence
  Synthetic
taaagtcaaatttgact

SEQ ID NO: 6473 - DNA, 17 bp, Artificial Sequence
  Synthetic
gtaaagtcaaatttgac

SEQ ID NO: 6474 - DNA, 17 bp, Artificial Sequence
  Synthetic
ggtaaagtcaaatttga

SEQ ID NO: 6475 - DNA, 17 bp, Artificial Sequence
  Synthetic
aggtaaagtcaaatttg

SEQ ID NO: 6476 - DNA, 17 bp, Artificial Sequence
  Synthetic
aaggtaaagtcaaattt

SEQ ID NO: 6477 - DNA, 17 bp, Artificial Sequence
  Synthetic
aaaggtaaagtcaaatt

SEQ ID NO: 6478 - DNA, 17 bp, Artificial Sequence
  Synthetic
gaaaggtaaagtcaaat

SEQ ID NO: 6479 - DNA, 17 bp, Artificial Sequence
  Synthetic
gaggaaaggtaaagtca

SEQ ID NO: 6480 - DNA, 17 bp, Artificial Sequence
  Synthetic
tgaggaaaggtaaagtc

SEQ ID NO: 6481 - DNA, 17 bp, Artificial Sequence
  Synthetic
ttgaggaaaggtaaagt

SEQ ID NO: 6482 - DNA, 17 bp, Artificial Sequence
  Synthetic
tttgaggaaaggtaaag

SEQ ID NO: 6483 - DNA, 17 bp, Artificial Sequence
  Synthetic
ctttgaggaaaggtaaa

SEQ ID NO: 6484 - DNA, 17 bp, Artificial Sequence
  Synthetic
tctttgaggaaaggtaa

SEQ ID NO: 6485 - DNA, 17 bp, Artificial Sequence
  Synthetic
atctttgaggaaaggta

SEQ ID NO: 6486 - DNA, 17 bp, Artificial Sequence
  Synthetic
tatctttgaggaaaggt

SEQ ID NO: 6487 - DNA, 17 bp, Artificial Sequence
  Synthetic
atatctttgaggaaagg

SEQ ID NO: 6488 - DNA, 17 bp, Artificial Sequence
  Synthetic
tatatctttgaggaaag

SEQ ID NO: 6489 - DNA, 17 bp, Artificial Sequence
  Synthetic
atatatctttgaggaaa

SEQ ID NO: 6490 - DNA, 17 bp, Artificial Sequence
  Synthetic
aatatatctttgaggaa

SEQ ID NO: 6491 - DNA, 17 bp, Artificial Sequence
  Synthetic
aaatatatctttgagga

SEQ ID NO: 6492 - DNA, 17 bp, Artificial Sequence
  Synthetic
taaatatatctttgagg

SEQ ID NO: 6493 - DNA, 17 bp, Artificial Sequence
  Synthetic
ttaaatatatctttgag

SEQ ID NO: 6494 - DNA, 17 bp, Artificial Sequence
  Synthetic
tttaaatatatctttga

SEQ ID NO: 6495 - DNA, 17 bp, Artificial Sequence
  Synthetic
gtttaaatatatctttg

SEQ ID NO: 6496 - DNA, 17 bp, Artificial Sequence
  Synthetic
ggtttaaatatatcttt

SEQ ID NO: 6497 - DNA, 17 bp, Artificial Sequence
  Synthetic
tggtttaaatatatctt

SEQ ID NO: 6498 - DNA, 17 bp, Artificial Sequence
  Synthetic
ttggtttaaatatatct

SEQ ID NO: 6499 - DNA, 17 bp, Artificial Sequence
  Synthetic
gttggtttaaatatatc

SEQ ID NO: 6500 - DNA, 17 bp, Artificial Sequence
  Synthetic
ggttggtttaaatatat

SEQ ID NO: 6501 - DNA, 17 bp, Artificial Sequence
  Synthetic
aggttggtttaaatata

SEQ ID NO: 6502 - DNA, 17 bp, Artificial Sequence
  Synthetic
gaggttggtttaaatat

SEQ ID NO: 6503 - DNA, 17 bp, Artificial Sequence
  Synthetic
tgaggttggtttaaata

SEQ ID NO: 6504 - DNA, 17 bp, Artificial Sequence
  Synthetic
atgaggttggtttaaat

SEQ ID NO: 6505 - DNA, 17 bp, Artificial Sequence
  Synthetic
catgaggttggtttaaa

SEQ ID NO: 6506 - DNA, 17 bp, Artificial Sequence
  Synthetic
gcatgaggttggtttaa

SEQ ID NO: 6507 - DNA, 17 bp, Artificial Sequence
  Synthetic
ggcatgaggttggttta

SEQ ID NO: 6508 - DNA, 17 bp, Artificial Sequence
  Synthetic
gggcatgaggttggttt

SEQ ID NO: 6509 - DNA, 17 bp, Artificial Sequence
  Synthetic
agggcatgaggttggtt

SEQ ID NO: 6510 - DNA, 17 bp, Artificial Sequence
  Synthetic
cagggcatgaggttggt

SEQ ID NO: 6511 - DNA, 17 bp, Artificial Sequence
  Synthetic
acagggcatgaggttgg

SEQ ID NO: 6512 - DNA, 17 bp, Artificial Sequence
  Synthetic
aacagggcatgaggttg

SEQ ID NO: 6513 - DNA, 17 bp, Artificial Sequence
  Synthetic
caacagggcatgaggtt

SEQ ID NO: 6514 - DNA, 17 bp, Artificial Sequence
  Synthetic
tcaacagggcatgaggt

SEQ ID NO: 6515 - DNA, 17 bp, Artificial Sequence
  Synthetic
atcaacagggcatgagg

SEQ ID NO: 6516 - DNA, 17 bp, Artificial Sequence
  Synthetic
tatcaacagggcatgag

SEQ ID NO: 6517 - DNA, 17 bp, Artificial Sequence
  Synthetic
ttatcaacagggcatga

SEQ ID NO: 6518 - DNA, 17 bp, Artificial Sequence
  Synthetic
tttatcaacagggcatg

SEQ ID NO: 6519 - DNA, 17 bp, Artificial Sequence
  Synthetic
gtttatcaacagggcat

SEQ ID NO: 6520 - DNA, 17 bp, Artificial Sequence
  Synthetic
ggtttatcaacagggca

SEQ ID NO: 6521 - DNA, 17 bp, Artificial Sequence
  Synthetic
tggtttatcaacagggc

SEQ ID NO: 6522 - DNA, 17 bp, Artificial Sequence
  Synthetic
ttggtttatcaacaggg

SEQ ID NO: 6523 - DNA, 17 bp, Artificial Sequence
  Synthetic
attggtttatcaacagg

SEQ ID NO: 6524 - DNA, 17 bp, Artificial Sequence
  Synthetic
gattggtttatcaacag

SEQ ID NO: 6525 - DNA, 17 bp, Artificial Sequence
  Synthetic
tgattggtttatcaaca

SEQ ID NO: 6526 - DNA, 17 bp, Artificial Sequence
  Synthetic
ttgattggtttatcaac

SEQ ID NO: 6527 - DNA, 17 bp, Artificial Sequence
  Synthetic
tttgattggtttatcaa

SEQ ID NO: 6528 - DNA, 17 bp, Artificial Sequence
  Synthetic
atttgattggtttatca

SEQ ID NO: 6529 - DNA, 17 bp, Artificial Sequence
  Synthetic
aatttgattggtttatc

SEQ ID NO: 6530 - DNA, 17 bp, Artificial Sequence
  Synthetic
caatttgattggtttat

SEQ ID NO: 6531 - DNA, 17 bp, Artificial Sequence
  Synthetic
ccaatttgattggttta

SEQ ID NO: 6532 - DNA, 17 bp, Artificial Sequence
  Synthetic
accaatttgattggttt

SEQ ID NO: 6533 - DNA, 17 bp, Artificial Sequence
  Synthetic
taccaatttgattggtt

SEQ ID NO: 6534 - DNA, 17 bp, Artificial Sequence
  Synthetic
ttaccaatttgattggt

SEQ ID NO: 6535 - DNA, 17 bp, Artificial Sequence
  Synthetic
tttaccaatttgattgg

SEQ ID NO: 6536 - DNA, 17 bp, Artificial Sequence
  Synthetic
ctttaccaatttgattg

SEQ ID NO: 6537 - DNA, 17 bp, Artificial Sequence
  Synthetic
tctttaccaatttgatt

SEQ ID NO: 6538 - DNA, 17 bp, Artificial Sequence
  Synthetic
gtctttaccaatttgat

SEQ ID NO: 6539 - DNA, 17 bp, Artificial Sequence
  Synthetic
ggtctttaccaatttga

SEQ ID NO: 6540 - DNA, 17 bp, Artificial Sequence
  Synthetic
aggtctttaccaatttg

SEQ ID NO: 6541 - DNA, 17 bp, Artificial Sequence
  Synthetic
taggtctttaccaattt

SEQ ID NO: 6542 - DNA, 17 bp, Artificial Sequence
  Synthetic
ttaggtctttaccaatt

SEQ ID NO: 6543 - DNA, 17 bp, Artificial Sequence
  Synthetic
tttaggtctttaccaat

SEQ ID NO: 6544 - DNA, 17 bp, Artificial Sequence
  Synthetic
ttttaggtctttaccaa

SEQ ID NO: 6545 - DNA, 17 bp, Artificial Sequence
  Synthetic
gttttaggtctttacca

SEQ ID NO: 6546 - DNA, 17 bp, Artificial Sequence
  Synthetic
ggttttaggtctttacc

SEQ ID NO: 6547 - DNA, 17 bp, Artificial Sequence
  Synthetic
tggttttaggtctttac

SEQ ID NO: 6548 - DNA, 17 bp, Artificial Sequence
  Synthetic
ttggttttaggtcttta

SEQ ID NO: 6549 - DNA, 17 bp, Artificial Sequence
  Synthetic
tttggttttaggtcttt

SEQ ID NO: 6550 - DNA, 17 bp, Artificial Sequence
  Synthetic
ttttggttttaggtctt

SEQ ID NO: 6551 - DNA, 17 bp, Artificial Sequence
  Synthetic
gttttggttttaggtct

SEQ ID NO: 6552 - DNA, 17 bp, Artificial Sequence
  Synthetic
tgttttggttttaggtc

SEQ ID NO: 6553 - DNA, 17 bp, Artificial Sequence
  Synthetic
ttgttttggttttaggt

SEQ ID NO: 6554 - DNA, 17 bp, Artificial Sequence
  Synthetic
tttgttttggttttagg

SEQ ID NO: 6555 - DNA, 17 bp, Artificial Sequence
  Synthetic
atttgttttggttttag

SEQ ID NO: 6556 - DNA, 17 bp, Artificial Sequence
  Synthetic
tatttgttttggtttta

SEQ ID NO: 6557 - DNA, 17 bp, Artificial Sequence
  Synthetic
ttatttgttttggtttt

SEQ ID NO: 6558 - DNA, 17 bp, Artificial Sequence
  Synthetic
tttatttgttttggttt

SEQ ID NO: 6559 - DNA, 17 bp, Artificial Sequence
  Synthetic
ctttatttgttttggtt

SEQ ID NO: 6560 - DNA, 17 bp, Artificial Sequence
  Synthetic
tctttatttgttttggt

SEQ ID NO: 6561 - DNA, 17 bp, Artificial Sequence
  Synthetic
ttctttatttgttttgg

SEQ ID NO: 6562 - DNA, 17 bp, Artificial Sequence
  Synthetic
tttctttatttgttttg

SEQ ID NO: 6563 - DNA, 17 bp, Artificial Sequence
  Synthetic
gtttctttatttgtttt

SEQ ID NO: 6564 - DNA, 17 bp, Artificial Sequence
  Synthetic
tgtttctttatttgttt

SEQ ID NO: 6565 - DNA, 17 bp, Artificial Sequence
  Synthetic
gtgtttctttatttgtt

SEQ ID NO: 6566 - DNA, 17 bp, Artificial Sequence
  Synthetic
tgtgtttctttatttgt

SEQ ID NO: 6567 - DNA, 17 bp, Artificial Sequence
  Synthetic
ttgtgtttctttatttg

SEQ ID NO: 6568 - DNA, 17 bp, Artificial Sequence
  Synthetic
tttgtgtttctttattt

SEQ ID NO: 6569 - DNA, 17 bp, Artificial Sequence
  Synthetic
ttttgtgtttctttatt

SEQ ID NO: 6570 - DNA, 17 bp, Artificial Sequence
  Synthetic
gttttgtgtttctttat

SEQ ID NO: 6571 - DNA, 17 bp, Artificial Sequence
  Synthetic
ggttttgtgtttcttta

SEQ ID NO: 6572 - DNA, 17 bp, Artificial Sequence
  Synthetic
gggttttgtgtttcttt

SEQ ID NO: 6573 - DNA, 17 bp, Artificial Sequence
  Synthetic
agggttttgtgtttctt

SEQ ID NO: 6574 - DNA, 17 bp, Artificial Sequence
  Synthetic
gagggttttgtgtttct

SEQ ID NO: 6575 - DNA, 17 bp, Artificial Sequence
  Synthetic
tgagggttttgtgtttc

SEQ ID NO: 6576 - DNA, 17 bp, Artificial Sequence
  Synthetic
ctgagggttttgtgttt

SEQ ID NO: 6577 - DNA, 17 bp, Artificial Sequence
  Synthetic
actgagggttttgtgtt

SEQ ID NO: 6578 - DNA, 17 bp, Artificial Sequence
  Synthetic
cactgagggttttgtgt

SEQ ID NO: 6579 - DNA, 17 bp, Artificial Sequence
  Synthetic
gcactgagggttttgtg

SEQ ID NO: 6580 - DNA, 17 bp, Artificial Sequence
  Synthetic
agcactgagggttttgt

SEQ ID NO: 6581 - DNA, 17 bp, Artificial Sequence
  Synthetic
cagcactgagggttttg

SEQ ID NO: 6582 - DNA, 17 bp, Artificial Sequence
  Synthetic
ccagcactgagggtttt

SEQ ID NO: 6583 - DNA, 17 bp, Artificial Sequence
  Synthetic
tccagcactgagggttt

SEQ ID NO: 6584 - DNA, 17 bp, Artificial Sequence
  Synthetic
ctccagcactgagggtt

SEQ ID NO: 6585 - DNA, 17 bp, Artificial Sequence
  Synthetic
tctccagcactgagggt

SEQ ID NO: 6586 - DNA, 17 bp, Artificial Sequence
  Synthetic
ttctccagcactgaggg

SEQ ID NO: 6587 - DNA, 17 bp, Artificial Sequence
  Synthetic
cttctccagcactgagg

SEQ ID NO: 6588 - DNA, 17 bp, Artificial Sequence
  Synthetic
tcttctccagcactgag

SEQ ID NO: 6589 - DNA, 17 bp, Artificial Sequence
  Synthetic
ctcttctccagcactga

SEQ ID NO: 6590 - DNA, 17 bp, Artificial Sequence
  Synthetic
actcttctccagcactg

SEQ ID NO: 6591 - DNA, 17 bp, Artificial Sequence
  Synthetic
gactcttctccagcact

SEQ ID NO: 6592 - DNA, 17 bp, Artificial Sequence
  Synthetic
tgactcttctccagcac

SEQ ID NO: 6593 - DNA, 17 bp, Artificial Sequence
  Synthetic
ctgactcttctccagca

SEQ ID NO: 6594 - DNA, 17 bp, Artificial Sequence
  Synthetic
actgactcttctccagc

SEQ ID NO: 6595 - DNA, 17 bp, Artificial Sequence
  Synthetic
cactgactcttctccag

SEQ ID NO: 6596 - DNA, 17 bp, Artificial Sequence
  Synthetic
tcactgactcttctcca

SEQ ID NO: 6597 - DNA, 17 bp, Artificial Sequence
  Synthetic
ctcactgactcttctcc

SEQ ID NO: 6598 - DNA, 17 bp, Artificial Sequence
  Synthetic
tctcactgactcttctc

SEQ ID NO: 6599 - DNA, 17 bp, Artificial Sequence
  Synthetic
gtctcactgactcttct

SEQ ID NO: 6600 - DNA, 17 bp, Artificial Sequence
  Synthetic
ggtctcactgactcttc

SEQ ID NO: 6601 - DNA, 17 bp, Artificial Sequence
  Synthetic
tggtctcactgactctt

SEQ ID NO: 6602 - DNA, 17 bp, Artificial Sequence
  Synthetic
ctggtctcactgactct

SEQ ID NO: 6603 - DNA, 17 bp, Artificial Sequence
  Synthetic
gctggtctcactgactc

SEQ ID NO: 6604 - DNA, 17 bp, Artificial Sequence
  Synthetic
tgctggtctcactgact

SEQ ID NO: 6605 - DNA, 17 bp, Artificial Sequence
  Synthetic
gtgctggtctcactgac

SEQ ID NO: 6606 - DNA, 17 bp, Artificial Sequence
  Synthetic
agtgctggtctcactga

SEQ ID NO: 6607 - DNA, 17 bp, Artificial Sequence
  Synthetic
gagtgctggtctcactg

SEQ ID NO: 6608 - DNA, 17 bp, Artificial Sequence
  Synthetic
agagtgctggtctcact

SEQ ID NO: 6609 - DNA, 17 bp, Artificial Sequence
  Synthetic
tgagagtgctggtctca

SEQ ID NO: 6610 - DNA, 17 bp, Artificial Sequence
  Synthetic
ttgagagtgctggtctc

SEQ ID NO: 6611 - DNA, 17 bp, Artificial Sequence
  Synthetic
tttgagagtgctggtct

SEQ ID NO: 6612 - DNA, 17 bp, Artificial Sequence
  Synthetic
gtttgagagtgctggtc

SEQ ID NO: 6613 - DNA, 17 bp, Artificial Sequence
  Synthetic
tgtttgagagtgctggt

SEQ ID NO: 6614 - DNA, 17 bp, Artificial Sequence
  Synthetic
gtgtttgagagtgctgg

SEQ ID NO: 6615 - DNA, 17 bp, Artificial Sequence
  Synthetic
agtgtttgagagtgctg

SEQ ID NO: 6616 - DNA, 17 bp, Artificial Sequence
  Synthetic
cagtgtttgagagtgct

SEQ ID NO: 6617 - DNA, 17 bp, Artificial Sequence
  Synthetic
ccagtgtttgagagtgc

SEQ ID NO: 6618 - DNA, 17 bp, Artificial Sequence
  Synthetic
tccagtgtttgagagtg

SEQ ID NO: 6619 - DNA, 17 bp, Artificial Sequence
  Synthetic
ttccagtgtttgagagt

SEQ ID NO: 6620 - DNA, 17 bp, Artificial Sequence
  Synthetic
gttccagtgtttgagag

SEQ ID NO: 6621 - DNA, 17 bp, Artificial Sequence
  Synthetic
agttccagtgtttgaga

SEQ ID NO: 6622 - DNA, 17 bp, Artificial Sequence
  Synthetic
cagttccagtgtttgag

SEQ ID NO: 6623 - DNA, 17 bp, Artificial Sequence
  Synthetic
ccagttccagtgtttga

SEQ ID NO: 6624 - DNA, 17 bp, Artificial Sequence
  Synthetic
tccagttccagtgtttg

SEQ ID NO: 6625 - DNA, 17 bp, Artificial Sequence
  Synthetic
gtccagttccagtgttt

SEQ ID NO: 6626 - DNA, 17 bp, Artificial Sequence
  Synthetic
cgtccagttccagtgtt

SEQ ID NO: 6627 - DNA, 17 bp, Artificial Sequence
  Synthetic
acgtccagttccagtgt

SEQ ID NO: 6628 - DNA, 17 bp, Artificial Sequence
  Synthetic
aacgtccagttccagtg

SEQ ID NO: 6629 - DNA, 17 bp, Artificial Sequence
  Synthetic
gaacgtccagttccagt

SEQ ID NO: 6630 - DNA, 17 bp, Artificial Sequence
  Synthetic
tacgaacgtccagttcc

SEQ ID NO: 6631 - DNA, 17 bp, Artificial Sequence
  Synthetic
gtacgaacgtccagttc

SEQ ID NO: 6632 - DNA, 17 bp, Artificial Sequence
  Synthetic
tgtacgaacgtccagtt

SEQ ID NO: 6633 - DNA, 17 bp, Artificial Sequence
  Synthetic
ctgtacgaacgtccagt

SEQ ID NO: 6634 - DNA, 17 bp, Artificial Sequence
  Synthetic
actgtacgaacgtccag

SEQ ID NO: 6635 - DNA, 17 bp, Artificial Sequence
  Synthetic
gactgtacgaacgtcca

SEQ ID NO: 6636 - DNA, 17 bp, Artificial Sequence
  Synthetic
agactgtacgaacgtcc

SEQ ID NO: 6637 - DNA, 17 bp, Artificial Sequence
  Synthetic
aagactgtacgaacgtc

SEQ ID NO: 6638 - DNA, 17 bp, Artificial Sequence
  Synthetic
aaagactgtacgaacgt

SEQ ID NO: 6639 - DNA, 17 bp, Artificial Sequence
  Synthetic
taaagactgtacgaacg

SEQ ID NO: 6640 - DNA, 17 bp, Artificial Sequence
  Synthetic
gtaaagactgtacgaac

SEQ ID NO: 6641 - DNA, 17 bp, Artificial Sequence
  Synthetic
cgtaaagactgtacgaa

SEQ ID NO: 6642 - DNA, 17 bp, Artificial Sequence
  Synthetic
ccgtaaagactgtacga

SEQ ID NO: 6643 - DNA, 17 bp, Artificial Sequence
  Synthetic
tccgtaaagactgtacg

SEQ ID NO: 6644 - DNA, 17 bp, Artificial Sequence
  Synthetic
ttccgtaaagactgtac

SEQ ID NO: 6645 - DNA, 17 bp, Artificial Sequence
  Synthetic
cttccgtaaagactgta

SEQ ID NO: 6646 - DNA, 17 bp, Artificial Sequence
  Synthetic
tcttccgtaaagactgt

SEQ ID NO: 6647 - DNA, 17 bp, Artificial Sequence
  Synthetic
gtcttccgtaaagactg

SEQ ID NO: 6648 - DNA, 17 bp, Artificial Sequence
  Synthetic
tgtcttccgtaaagact

SEQ ID NO: 6649 - DNA, 17 bp, Artificial Sequence
  Synthetic
gtgtcttccgtaaagac

SEQ ID NO: 6650 - DNA, 17 bp, Artificial Sequence
  Synthetic
agtgtcttccgtaaaga

SEQ ID NO: 6651 - DNA, 17 bp, Artificial Sequence
  Synthetic
aagtgtcttccgtaaag

SEQ ID NO: 6652 - DNA, 17 bp, Artificial Sequence
  Synthetic
ccaagtgtcttccgtaa

SEQ ID NO: 6653 - DNA, 17 bp, Artificial Sequence
  Synthetic
accaagtgtcttccgta

SEQ ID NO: 6654 - DNA, 17 bp, Artificial Sequence
  Synthetic
gaccaagtgtcttccgt

SEQ ID NO: 6655 - DNA, 17 bp, Artificial Sequence
  Synthetic
tgaccaagtgtcttccg

SEQ ID NO: 6656 - DNA, 17 bp, Artificial Sequence
  Synthetic
ttgaccaagtgtcttcc

SEQ ID NO: 6657 - DNA, 17 bp, Artificial Sequence
  Synthetic
gttgaccaagtgtcttc

SEQ ID NO: 6658 - DNA, 17 bp, Artificial Sequence
  Synthetic
cgttgaccaagtgtctt

SEQ ID NO: 6659 - DNA, 17 bp, Artificial Sequence
  Synthetic
acgttgaccaagtgtct

SEQ ID NO: 6660 - DNA, 17 bp, Artificial Sequence
  Synthetic
tacgttgaccaagtgtc

SEQ ID NO: 6661 - DNA, 17 bp, Artificial Sequence
  Synthetic
gtacgttgaccaagtgt

SEQ ID NO: 6662 - DNA, 17 bp, Artificial Sequence
  Synthetic
tgtacgttgaccaagtg

SEQ ID NO: 6663 - DNA, 17 bp, Artificial Sequence
  Synthetic
gtgtacgttgaccaagt

SEQ ID NO: 6664 - DNA, 17 bp, Artificial Sequence
  Synthetic
ggtgtacgttgaccaag

SEQ ID NO: 6665 - DNA, 17 bp, Artificial Sequence
  Synthetic
cggtgtacgttgaccaa

SEQ ID NO: 6666 - DNA, 17 bp, Artificial Sequence
  Synthetic
tcggtgtacgttgacca

SEQ ID NO: 6667 - DNA, 17 bp, Artificial Sequence
  Synthetic
ctcggtgtacgttgacc

SEQ ID NO: 6668 - DNA, 17 bp, Artificial Sequence
  Synthetic
tctcggtgtacgttgac

SEQ ID NO: 6669 - DNA, 17 bp, Artificial Sequence
  Synthetic
gtctcggtgtacgttga

SEQ ID NO: 6670 - DNA, 17 bp, Artificial Sequence
  Synthetic
ggtctcggtgtacgttg

SEQ ID NO: 6671 - DNA, 17 bp, Artificial Sequence
  Synthetic
gggtctcggtgtacgtt

SEQ ID NO: 6672 - DNA, 17 bp, Artificial Sequence
  Synthetic
agggtctcggtgtacgt

SEQ ID NO: 6673 - DNA, 17 bp, Artificial Sequence
  Synthetic
taagggtctcggtgtac

SEQ ID NO: 6674 - DNA, 17 bp, Artificial Sequence
  Synthetic
ataagggtctcggtgta

SEQ ID NO: 6675 - DNA, 17 bp, Artificial Sequence
  Synthetic
aataagggtctcggtgt

SEQ ID NO: 6676 - DNA, 17 bp, Artificial Sequence
  Synthetic
gaataagggtctcggtg

SEQ ID NO: 6677 - DNA, 17 bp, Artificial Sequence
  Synthetic
tgaataagggtctcggt

SEQ ID NO: 6678 - DNA, 17 bp, Artificial Sequence
  Synthetic
gtgaataagggtctcgg

SEQ ID NO: 6679 - DNA, 17 bp, Artificial Sequence
  Synthetic
ggtgaataagggtctcg

SEQ ID NO: 6680 - DNA, 17 bp, Artificial Sequence
  Synthetic
tggtgaataagggtctc

SEQ ID NO: 6681 - DNA, 17 bp, Artificial Sequence
  Synthetic
gtggtgaataagggtct

SEQ ID NO: 6682 - DNA, 17 bp, Artificial Sequence
  Synthetic
ggtggtgaataagggtc

SEQ ID NO: 6683 - DNA, 17 bp, Artificial Sequence
  Synthetic
aggtggtgaataagggt

SEQ ID NO: 6684 - DNA, 17 bp, Artificial Sequence
  Synthetic
tcaaaggtggtgaataa

SEQ ID NO: 6685 - DNA, 17 bp, Artificial Sequence
  Synthetic
gtcaaaggtggtgaata

SEQ ID NO: 6686 - DNA, 17 bp, Artificial Sequence
  Synthetic
ggtcaaaggtggtgaat

SEQ ID NO: 6687 - DNA, 17 bp, Artificial Sequence
  Synthetic
gggtcaaaggtggtgaa

SEQ ID NO: 6688 - DNA, 17 bp, Artificial Sequence
  Synthetic
tgggtcaaaggtggtga

SEQ ID NO: 6689 - DNA, 17 bp, Artificial Sequence
  Synthetic
ctgggtcaaaggtggtg

SEQ ID NO: 6690 - DNA, 17 bp, Artificial Sequence
  Synthetic
actgggtcaaaggtggt

SEQ ID NO: 6691 - DNA, 17 bp, Artificial Sequence
  Synthetic
tactgggtcaaaggtgg

SEQ ID NO: 6692 - DNA, 17 bp, Artificial Sequence
  Synthetic
ttactgggtcaaaggtg

SEQ ID NO: 6693 - DNA, 17 bp, Artificial Sequence
  Synthetic
gttactgggtcaaaggt

SEQ ID NO: 6694 - DNA, 17 bp, Artificial Sequence
  Synthetic
agttactgggtcaaagg

SEQ ID NO: 6695 - DNA, 17 bp, Artificial Sequence
  Synthetic
gagttactgggtcaaag

SEQ ID NO: 6696 - DNA, 17 bp, Artificial Sequence
  Synthetic
tagagttactgggtcaa

SEQ ID NO: 6697 - DNA, 17 bp, Artificial Sequence
  Synthetic
ttagagttactgggtca

SEQ ID NO: 6698 - DNA, 17 bp, Artificial Sequence
  Synthetic
attagagttactgggtc

SEQ ID NO: 6699 - DNA, 17 bp, Artificial Sequence
  Synthetic
gattagagttactgggt

SEQ ID NO: 6700 - DNA, 17 bp, Artificial Sequence
  Synthetic
agattagagttactggg

SEQ ID NO: 6701 - DNA, 17 bp, Artificial Sequence
  Synthetic
aagattagagttactgg

SEQ ID NO: 6702 - DNA, 17 bp, Artificial Sequence
  Synthetic
taagattagagttactg

SEQ ID NO: 6703 - DNA, 17 bp, Artificial Sequence
  Synthetic
ctaagattagagttact

SEQ ID NO: 6704 - DNA, 17 bp, Artificial Sequence
  Synthetic
cctaagattagagttac

SEQ ID NO: 6705 - DNA, 17 bp, Artificial Sequence
  Synthetic
tcctaagattagagtta

SEQ ID NO: 6706 - DNA, 17 bp, Artificial Sequence
  Synthetic
ttcctaagattagagtt

SEQ ID NO: 6707 - DNA, 17 bp, Artificial Sequence
  Synthetic
cttcctaagattagagt

SEQ ID NO: 6708 - DNA, 17 bp, Artificial Sequence
  Synthetic
tcttcctaagattagag

SEQ ID NO: 6709 - DNA, 17 bp, Artificial Sequence
  Synthetic
ttcttcctaagattaga

SEQ ID NO: 6710 - DNA, 17 bp, Artificial Sequence
  Synthetic
gttcttcctaagattag

SEQ ID NO: 6711 - DNA, 17 bp, Artificial Sequence
  Synthetic
ggttcttcctaagatta

SEQ ID NO: 6712 - DNA, 17 bp, Artificial Sequence
  Synthetic
aggttcttcctaagatt

SEQ ID NO: 6713 - DNA, 17 bp, Artificial Sequence
  Synthetic
taggttcttcctaagat

SEQ ID NO: 6714 - DNA, 17 bp, Artificial Sequence
  Synthetic
gtaggttcttcctaaga

SEQ ID NO: 6715 - DNA, 17 bp, Artificial Sequence
  Synthetic
agtaggttcttcctaag

SEQ ID NO: 6716 - DNA, 17 bp, Artificial Sequence
  Synthetic
cagtaggttcttcctaa

SEQ ID NO: 6717 - DNA, 17 bp, Artificial Sequence
  Synthetic
tcagtaggttcttccta

SEQ ID NO: 6718 - DNA, 17 bp, Artificial Sequence
  Synthetic
ttcagtaggttcttcct

SEQ ID NO: 6719 - DNA, 17 bp, Artificial Sequence
  Synthetic
tttcagtaggttcttcc

SEQ ID NO: 6720 - DNA, 17 bp, Artificial Sequence
  Synthetic
gtttcagtaggttcttc

SEQ ID NO: 6721 - DNA, 17 bp, Artificial Sequence
  Synthetic
tgtttcagtaggttctt

SEQ ID NO: 6722 - DNA, 17 bp, Artificial Sequence
  Synthetic
ttgtttcagtaggttct

SEQ ID NO: 6723 - DNA, 17 bp, Artificial Sequence
  Synthetic
tttgtttcagtaggttc

SEQ ID NO: 6724 - DNA, 17 bp, Artificial Sequence
  Synthetic
ttttgtttcagtaggtt

SEQ ID NO: 6725 - DNA, 17 bp, Artificial Sequence
  Synthetic
tttttgtttcagtaggt

SEQ ID NO: 6726 - DNA, 17 bp, Artificial Sequence
  Synthetic
ttttttgtttcagtagg

SEQ ID NO: 6727 - DNA, 17 bp, Artificial Sequence
  Synthetic
tttttttgtttcagtag

SEQ ID NO: 6728 - DNA, 17 bp, Artificial Sequence
  Synthetic
ttttttttgtttcagta

SEQ ID NO: 6729 - DNA, 17 bp, Artificial Sequence
  Synthetic
attttttttgtttcagt

SEQ ID NO: 6730 - DNA, 17 bp, Artificial Sequence
  Synthetic
gattttttttgtttcag

SEQ ID NO: 6731 - DNA, 17 bp, Artificial Sequence
  Synthetic
ggattttttttgtttca

SEQ ID NO: 6732 - DNA, 17 bp, Artificial Sequence
  Synthetic
tggattttttttgtttc

SEQ ID NO: 6733 - DNA, 17 bp, Artificial Sequence
  Synthetic
ttggattttttttgttt

SEQ ID NO: 6734 - DNA, 17 bp, Artificial Sequence
  Synthetic
tttggattttttttgtt

SEQ ID NO: 6735 - DNA, 17 bp, Artificial Sequence
  Synthetic
ttttggattttttttgt

SEQ ID NO: 6736 - DNA, 17 bp, Artificial Sequence
  Synthetic
attttggattttttttg

SEQ ID NO: 6737 - DNA, 17 bp, Artificial Sequence
  Synthetic
cattttggatttttttt

SEQ ID NO: 6738 - DNA, 17 bp, Artificial Sequence
  Synthetic
acattttggattttttt

SEQ ID NO: 6739 - DNA, 17 bp, Artificial Sequence
  Synthetic
tacattttggatttttt

SEQ ID NO: 6740 - DNA, 17 bp, Artificial Sequence
  Synthetic
ctacattttggattttt

SEQ ID NO: 6741 - DNA, 17 bp, Artificial Sequence
  Synthetic
tctacattttggatttt

SEQ ID NO: 6742 - DNA, 17 bp, Artificial Sequence
  Synthetic
ttctacattttggattt

SEQ ID NO: 6743 - DNA, 17 bp, Artificial Sequence
  Synthetic
gttctacattttggatt

SEQ ID NO: 6744 - DNA, 17 bp, Artificial Sequence
  Synthetic
tgttctacattttggat

SEQ ID NO: 6745 - DNA, 17 bp, Artificial Sequence
  Synthetic
ttgttctacattttgga

SEQ ID NO: 6746 - DNA, 17 bp, Artificial Sequence
  Synthetic
cttgttctacattttgg

SEQ ID NO: 6747 - DNA, 17 bp, Artificial Sequence
  Synthetic
tcttgttctacattttg

SEQ ID NO: 6748 - DNA, 17 bp, Artificial Sequence
  Synthetic
gtcttgttctacatttt

SEQ ID NO: 6749 - DNA, 17 bp, Artificial Sequence
  Synthetic
agtcttgttctacattt

SEQ ID NO: 6750 - DNA, 17 bp, Artificial Sequence
  Synthetic
aagtcttgttctacatt

SEQ ID NO: 6751 - DNA, 17 bp, Artificial Sequence
  Synthetic
caagtcttgttctacat

SEQ ID NO: 6752 - DNA, 17 bp, Artificial Sequence
  Synthetic
tcaagtcttgttctaca

SEQ ID NO: 6753 - DNA, 17 bp, Artificial Sequence
  Synthetic
ttcaagtcttgttctac

SEQ ID NO: 6754 - DNA, 17 bp, Artificial Sequence
  Synthetic
attcaagtcttgttcta

SEQ ID NO: 6755 - DNA, 17 bp, Artificial Sequence
  Synthetic
aattcaagtcttgttct

SEQ ID NO: 6756 - DNA, 17 bp, Artificial Sequence
  Synthetic
aaattcaagtcttgttc

SEQ ID NO: 6757 - DNA, 17 bp, Artificial Sequence
  Synthetic
taaattcaagtcttgtt

SEQ ID NO: 6758 - DNA, 17 bp, Artificial Sequence
  Synthetic
gtaaattcaagtcttgt

SEQ ID NO: 6759 - DNA, 17 bp, Artificial Sequence
  Synthetic
ggtaaattcaagtcttg

SEQ ID NO: 6760 - DNA, 17 bp, Artificial Sequence
  Synthetic
tggtaaattcaagtctt

SEQ ID NO: 6761 - DNA, 17 bp, Artificial Sequence
  Synthetic
atggtaaattcaagtct

SEQ ID NO: 6762 - DNA, 17 bp, Artificial Sequence
  Synthetic
catggtaaattcaagtc

SEQ ID NO: 6763 - DNA, 17 bp, Artificial Sequence
  Synthetic
tcatggtaaattcaagt

SEQ ID NO: 6764 - DNA, 17 bp, Artificial Sequence
  Synthetic
atcatggtaaattcaag

SEQ ID NO: 6765 - DNA, 17 bp, Artificial Sequence
  Synthetic
tatcatggtaaattcaa

SEQ ID NO: 6766 - DNA, 17 bp, Artificial Sequence
  Synthetic
atatcatggtaaattca

SEQ ID NO: 6767 - DNA, 17 bp, Artificial Sequence
  Synthetic
aatatcatggtaaattc

SEQ ID NO: 6768 - DNA, 17 bp, Artificial Sequence
  Synthetic
taatatcatggtaaatt

SEQ ID NO: 6769 - DNA, 17 bp, Artificial Sequence
  Synthetic
ataatatcatggtaaat

SEQ ID NO: 6770 - DNA, 17 bp, Artificial Sequence
  Synthetic
aataatatcatggtaaa

SEQ ID NO: 6771 - DNA, 17 bp, Artificial Sequence
  Synthetic
aaataatatcatggtaa

SEQ ID NO: 6772 - DNA, 17 bp, Artificial Sequence
  Synthetic
taaataatatcatggta

SEQ ID NO: 6773 - DNA, 17 bp, Artificial Sequence
  Synthetic
ataaataatatcatggt

SEQ ID NO: 6774 - DNA, 17 bp, Artificial Sequence
  Synthetic
gataaataatatcatgg

SEQ ID NO: 6775 - DNA, 17 bp, Artificial Sequence
  Synthetic
tgataaataatatcatg

SEQ ID NO: 6776 - DNA, 17 bp, Artificial Sequence
  Synthetic
gtgataaataatatcat

SEQ ID NO: 6777 - DNA, 17 bp, Artificial Sequence
  Synthetic
tgtgataaataatatca

SEQ ID NO: 6778 - DNA, 17 bp, Artificial Sequence
  Synthetic
ctgtgataaataatatc

SEQ ID NO: 6779 - DNA, 17 bp, Artificial Sequence
  Synthetic
tctgtgataaataatat

SEQ ID NO: 6780 - DNA, 17 bp, Artificial Sequence
  Synthetic
ttctgtgataaataata

SEQ ID NO: 6781 - DNA, 17 bp, Artificial Sequence
  Synthetic
tttctgtgataaataat

SEQ ID NO: 6782 - DNA, 17 bp, Artificial Sequence
  Synthetic
atttctgtgataaataa

SEQ ID NO: 6783 - DNA, 17 bp, Artificial Sequence
  Synthetic
catttctgtgataaata

SEQ ID NO: 6784 - DNA, 17 bp, Artificial Sequence
  Synthetic
tcatttctgtgataaat

SEQ ID NO: 6785 - DNA, 17 bp, Artificial Sequence
  Synthetic
ttcatttctgtgataaa

SEQ ID NO: 6786 - DNA, 17 bp, Artificial Sequence
  Synthetic
cttcatttctgtgataa

SEQ ID NO: 6787 - DNA, 17 bp, Artificial Sequence
  Synthetic
acttcatttctgtgata

SEQ ID NO: 6788 - DNA, 17 bp, Artificial Sequence
  Synthetic
cacttcatttctgtgat

SEQ ID NO: 6789 - DNA, 17 bp, Artificial Sequence
  Synthetic
tcacttcatttctgtga

SEQ ID NO: 6790 - DNA, 17 bp, Artificial Sequence
  Synthetic
ttcacttcatttctgtg

SEQ ID NO: 6791 - DNA, 17 bp, Artificial Sequence
  Synthetic
tttcacttcatttctgt

SEQ ID NO: 6792 - DNA, 17 bp, Artificial Sequence
  Synthetic
gtttcacttcatttctg

SEQ ID NO: 6793 - DNA, 17 bp, Artificial Sequence
  Synthetic
ggtttcacttcatttct

SEQ ID NO: 6794 - DNA, 17 bp, Artificial Sequence
  Synthetic
tggtttcacttcatttc

SEQ ID NO: 6795 - DNA, 17 bp, Artificial Sequence
  Synthetic
atggtttcacttcattt

SEQ ID NO: 6796 - DNA, 17 bp, Artificial Sequence
  Synthetic
gatggtttcacttcatt

SEQ ID NO: 6797 - DNA, 17 bp, Artificial Sequence
  Synthetic
tgatggtttcacttcat

SEQ ID NO: 6798 - DNA, 17 bp, Artificial Sequence
  Synthetic
ttgatggtttcacttca

SEQ ID NO: 6799 - DNA, 17 bp, Artificial Sequence
  Synthetic
tttgatggtttcacttc

SEQ ID NO: 6800 - DNA, 17 bp, Artificial Sequence
  Synthetic
gtttgatggtttcactt

SEQ ID NO: 6801 - DNA, 17 bp, Artificial Sequence
  Synthetic
tgtttgatggtttcact

SEQ ID NO: 6802 - DNA, 17 bp, Artificial Sequence
  Synthetic
atgtttgatggtttcac

SEQ ID NO: 6803 - DNA, 17 bp, Artificial Sequence
  Synthetic
catgtttgatggtttca

SEQ ID NO: 6804 - DNA, 17 bp, Artificial Sequence
  Synthetic
acatgtttgatggtttc

SEQ ID NO: 6805 - DNA, 17 bp, Artificial Sequence
  Synthetic
aacatgtttgatggttt

SEQ ID NO: 6806 - DNA, 17 bp, Artificial Sequence
  Synthetic
gaacatgtttgatggtt

SEQ ID NO: 6807 - DNA, 17 bp, Artificial Sequence
  Synthetic
ggaacatgtttgatggt

SEQ ID NO: 6808 - DNA, 17 bp, Artificial Sequence
  Synthetic
tggaacatgtttgatgg

SEQ ID NO: 6809 - DNA, 17 bp, Artificial Sequence
  Synthetic
ttggaacatgtttgatg

SEQ ID NO: 6810 - DNA, 17 bp, Artificial Sequence
  Synthetic
tttggaacatgtttgat

SEQ ID NO: 6811 - DNA, 17 bp, Artificial Sequence
  Synthetic
ttttggaacatgtttga

SEQ ID NO: 6812 - DNA, 17 bp, Artificial Sequence
  Synthetic
cttttggaacatgtttg

SEQ ID NO: 6813 - DNA, 17 bp, Artificial Sequence
  Synthetic
acttttggaacatgttt

SEQ ID NO: 6814 - DNA, 17 bp, Artificial Sequence
  Synthetic
tacttttggaacatgtt

SEQ ID NO: 6815 - DNA, 17 bp, Artificial Sequence
  Synthetic
gtacttttggaacatgt

SEQ ID NO: 6816 - DNA, 17 bp, Artificial Sequence
  Synthetic
ggtacttttggaacatg

SEQ ID NO: 6817 - DNA, 17 bp, Artificial Sequence
  Synthetic
tggtacttttggaacat

SEQ ID NO: 6818 - DNA, 17 bp, Artificial Sequence
  Synthetic
ctggtacttttggaaca

SEQ ID NO: 6819 - DNA, 17 bp, Artificial Sequence
  Synthetic
tctggtacttttggaac

SEQ ID NO: 6820 - DNA, 17 bp, Artificial Sequence
  Synthetic
atctggtacttttggaa

SEQ ID NO: 6821 - DNA, 17 bp, Artificial Sequence
  Synthetic
catctggtacttttgga

SEQ ID NO: 6822 - DNA, 17 bp, Artificial Sequence
  Synthetic
ccatctggtacttttgg

SEQ ID NO: 6823 - DNA, 17 bp, Artificial Sequence
  Synthetic
gccatctggtacttttg

SEQ ID NO: 6824 - DNA, 17 bp, Artificial Sequence
  Synthetic
agccatctggtactttt

SEQ ID NO: 6825 - DNA, 17 bp, Artificial Sequence
  Synthetic
aagccatctggtacttt

SEQ ID NO: 6826 - DNA, 17 bp, Artificial Sequence
  Synthetic
taagccatctggtactt

SEQ ID NO: 6827 - DNA, 17 bp, Artificial Sequence
  Synthetic
ttaagccatctggtact

SEQ ID NO: 6828 - DNA, 17 bp, Artificial Sequence
  Synthetic
tttaagccatctggtac

SEQ ID NO: 6829 - DNA, 17 bp, Artificial Sequence
  Synthetic
atttaagccatctggta

SEQ ID NO: 6830 - DNA, 17 bp, Artificial Sequence
  Synthetic
tatttaagccatctggt

SEQ ID NO: 6831 - DNA, 17 bp, Artificial Sequence
  Synthetic
ttatttaagccatctgg

SEQ ID NO: 6832 - DNA, 17 bp, Artificial Sequence
  Synthetic
attatttaagccatctg

SEQ ID NO: 6833 - DNA, 17 bp, Artificial Sequence
  Synthetic
tattatttaagccatct

SEQ ID NO: 6834 - DNA, 17 bp, Artificial Sequence
  Synthetic
ctattatttaagccatc

SEQ ID NO: 6835 - DNA, 17 bp, Artificial Sequence
  Synthetic
actattatttaagccat

SEQ ID NO: 6836 - DNA, 17 bp, Artificial Sequence
  Synthetic
gactattatttaagcca

SEQ ID NO: 6837 - DNA, 17 bp, Artificial Sequence
  Synthetic
gccagactattatttaa

SEQ ID NO: 6838 - DNA, 17 bp, Artificial Sequence
  Synthetic
agccagactattattta

SEQ ID NO: 6839 - DNA, 17 bp, Artificial Sequence
  Synthetic
aagccagactattattt

SEQ ID NO: 6840 - DNA, 17 bp, Artificial Sequence
  Synthetic
caagccagactattatt

SEQ ID NO: 6841 - DNA, 17 bp, Artificial Sequence
  Synthetic
ccaagccagactattat

SEQ ID NO: 6842 - DNA, 17 bp, Artificial Sequence
  Synthetic
gccaagccagactatta

SEQ ID NO: 6843 - DNA, 17 bp, Artificial Sequence
  Synthetic
tgccaagccagactatt

SEQ ID NO: 6844 - DNA, 17 bp, Artificial Sequence
  Synthetic
gtgccaagccagactat

SEQ ID NO: 6845 - DNA, 17 bp, Artificial Sequence
  Synthetic
tgtgccaagccagacta

SEQ ID NO: 6846 - DNA, 17 bp, Artificial Sequence
  Synthetic
ttgtgccaagccagact

SEQ ID NO: 6847 - DNA, 17 bp, Artificial Sequence
  Synthetic
gttgtgccaagccagac

SEQ ID NO: 6848 - DNA, 17 bp, Artificial Sequence
  Synthetic
cgttgtgccaagccaga

SEQ ID NO: 6849 - DNA, 17 bp, Artificial Sequence
  Synthetic
tcgttgtgccaagccag

SEQ ID NO: 6850 - DNA, 17 bp, Artificial Sequence
  Synthetic
atcgttgtgccaagcca

SEQ ID NO: 6851 - DNA, 17 bp, Artificial Sequence
  Synthetic
catcgttgtgccaagcc

SEQ ID NO: 6852 - DNA, 17 bp, Artificial Sequence
  Synthetic
acatcgttgtgccaagc

SEQ ID NO: 6853 - DNA, 17 bp, Artificial Sequence
  Synthetic
aaaaaacatcgttgtgc

SEQ ID NO: 6854 - DNA, 17 bp, Artificial Sequence
  Synthetic
aaaaaaacatcgttgtg

SEQ ID NO: 6855 - DNA, 17 bp, Artificial Sequence
  Synthetic
aaaaaaaacatcgttgt

SEQ ID NO: 6856 - DNA, 17 bp, Artificial Sequence
  Synthetic
gaaaaaaaacatcgttg

SEQ ID NO: 6857 - DNA, 17 bp, Artificial Sequence
  Synthetic
agaaaaaaaacatcgtt

SEQ ID NO: 6858 - DNA, 17 bp, Artificial Sequence
  Synthetic
aagaaaaaaaacatcgt

SEQ ID NO: 6859 - DNA, 17 bp, Artificial Sequence
  Synthetic
aaagaaaaaaaacatcg

SEQ ID NO: 6860 - DNA, 17 bp, Artificial Sequence
  Synthetic
caaagaaaaaaaacatc

SEQ ID NO: 6861 - DNA, 17 bp, Artificial Sequence
  Synthetic
tcaaagaaaaaaaacat

SEQ ID NO: 6862 - DNA, 17 bp, Artificial Sequence
  Synthetic
ctcaaagaaaaaaaaca

SEQ ID NO: 6863 - DNA, 17 bp, Artificial Sequence
  Synthetic
tctcaaagaaaaaaaac

SEQ ID NO: 6864 - DNA, 17 bp, Artificial Sequence
  Synthetic
gtctcaaagaaaaaaaa

SEQ ID NO: 6865 - DNA, 17 bp, Artificial Sequence
  Synthetic
tgtctcaaagaaaaaaa

SEQ ID NO: 6866 - DNA, 17 bp, Artificial Sequence
  Synthetic
ctgtctcaaagaaaaaa

SEQ ID NO: 6867 - DNA, 17 bp, Artificial Sequence
  Synthetic
tctgtctcaaagaaaaa

SEQ ID NO: 6868 - DNA, 17 bp, Artificial Sequence
  Synthetic
ctctgtctcaaagaaaa

SEQ ID NO: 6869 - DNA, 17 bp, Artificial Sequence
  Synthetic
actctgtctcaaagaaa

SEQ ID NO: 6870 - DNA, 17 bp, Artificial Sequence
  Synthetic
gactctgtctcaaagaa

SEQ ID NO: 6871 - DNA, 17 bp, Artificial Sequence
  Synthetic
acagagactctgtctca

SEQ ID NO: 6872 - DNA, 17 bp, Artificial Sequence
  Synthetic
aacagagactctgtctc

SEQ ID NO: 6873 - DNA, 17 bp, Artificial Sequence
  Synthetic
caacagagactctgtct

SEQ ID NO: 6874 - DNA, 17 bp, Artificial Sequence
  Synthetic
gcaacagagactctgtc

SEQ ID NO: 6875 - DNA, 17 bp, Artificial Sequence
  Synthetic
agcaacagagactctgt

SEQ ID NO: 6876 - DNA, 17 bp, Artificial Sequence
  Synthetic
aagcaacagagactctg

SEQ ID NO: 6877 - DNA, 17 bp, Artificial Sequence
  Synthetic
caagcaacagagactct

SEQ ID NO: 6878 - DNA, 17 bp, Artificial Sequence
  Synthetic
ccaagcaacagagactc

SEQ ID NO: 6879 - DNA, 17 bp, Artificial Sequence
  Synthetic
cccaagcaacagagact

SEQ ID NO: 6880 - DNA, 17 bp, Artificial Sequence
  Synthetic
tgcagcccaagcaacag

SEQ ID NO: 6881 - DNA, 17 bp, Artificial Sequence
  Synthetic
ttgcagcccaagcaaca

SEQ ID NO: 6882 - DNA, 17 bp, Artificial Sequence
  Synthetic
attgcagcccaagcaac

SEQ ID NO: 6883 - DNA, 17 bp, Artificial Sequence
  Synthetic
cattgcagcccaagcaa

SEQ ID NO: 6884 - DNA, 17 bp, Artificial Sequence
  Synthetic
gcattgcagcccaagca

SEQ ID NO: 6885 - DNA, 17 bp, Artificial Sequence
  Synthetic
tgcattgcagcccaagc

SEQ ID NO: 6886 - DNA, 17 bp, Artificial Sequence
  Synthetic
ctgcattgcagcccaag

SEQ ID NO: 6887 - DNA, 17 bp, Artificial Sequence
  Synthetic
actgcattgcagcccaa

SEQ ID NO: 6888 - DNA, 17 bp, Artificial Sequence
  Synthetic
cactgcattgcagccca

SEQ ID NO: 6889 - DNA, 17 bp, Artificial Sequence
  Synthetic
tcactgcattgcagccc

SEQ ID NO: 6890 - DNA, 17 bp, Artificial Sequence
  Synthetic
atcactgcattgcagcc

SEQ ID NO: 6891 - DNA, 17 bp, Artificial Sequence
  Synthetic
catcactgcattgcagc

SEQ ID NO: 6892 - DNA, 17 bp, Artificial Sequence
  Synthetic
gcatcactgcattgcag

SEQ ID NO: 6893 - DNA, 17 bp, Artificial Sequence
  Synthetic
tgcatcactgcattgca

SEQ ID NO: 6894 - DNA, 17 bp, Artificial Sequence
  Synthetic
ttgcatcactgcattgc

SEQ ID NO: 6895 - DNA, 17 bp, Artificial Sequence
  Synthetic
attgcatcactgcattg

SEQ ID NO: 6896 - DNA, 17 bp, Artificial Sequence
  Synthetic
gattgcatcactgcatt

SEQ ID NO: 6897 - DNA, 17 bp, Artificial Sequence
  Synthetic
agattgcatcactgcat

SEQ ID NO: 6898 - DNA, 17 bp, Artificial Sequence
  Synthetic
caagattgcatcactgc

SEQ ID NO: 6899 - DNA, 17 bp, Artificial Sequence
  Synthetic
ccaagattgcatcactg

SEQ ID NO: 6900 - DNA, 17 bp, Artificial Sequence
  Synthetic
gccaagattgcatcact

SEQ ID NO: 6901 - DNA, 17 bp, Artificial Sequence
  Synthetic
gagccaagattgcatca

SEQ ID NO: 6902 - DNA, 17 bp, Artificial Sequence
  Synthetic
tgagccaagattgcatc

SEQ ID NO: 6903 - DNA, 17 bp, Artificial Sequence
  Synthetic
gtgagccaagattgcat

SEQ ID NO: 6904 - DNA, 17 bp, Artificial Sequence
  Synthetic
agtgagccaagattgca

SEQ ID NO: 6905 - DNA, 17 bp, Artificial Sequence
  Synthetic
cagtgagccaagattgc

SEQ ID NO: 6906 - DNA, 17 bp, Artificial Sequence
  Synthetic
gcagtgagccaagattg

SEQ ID NO: 6907 - DNA, 17 bp, Artificial Sequence
  Synthetic
tgcagtgagccaagatt

SEQ ID NO: 6908 - DNA, 17 bp, Artificial Sequence
  Synthetic
ttgcagtgagccaagat

SEQ ID NO: 6909 - DNA, 17 bp, Artificial Sequence
  Synthetic
gttgcagtgagccaaga

SEQ ID NO: 6910 - DNA, 17 bp, Artificial Sequence
  Synthetic
ggttgcagtgagccaag

SEQ ID NO: 6911 - DNA, 17 bp, Artificial Sequence
  Synthetic
aggttgcagtgagccaa

SEQ ID NO: 6912 - DNA, 17 bp, Artificial Sequence
  Synthetic
ggcggaggttgcagtga

SEQ ID NO: 6913 - DNA, 17 bp, Artificial Sequence
  Synthetic
aggcggaggttgcagtg

SEQ ID NO: 6914 - DNA, 17 bp, Artificial Sequence
  Synthetic
gaggcggaggttgcagt

SEQ ID NO: 6915 - DNA, 17 bp, Artificial Sequence
  Synthetic
caggaggcggaggttgc

SEQ ID NO: 6916 - DNA, 17 bp, Artificial Sequence
  Synthetic
ccaggaggcggaggttg

SEQ ID NO: 6917 - DNA, 17 bp, Artificial Sequence
  Synthetic
cccaggaggcggaggtt

SEQ ID NO: 6918 - DNA, 17 bp, Artificial Sequence
  Synthetic
acccaggaggcggaggt

SEQ ID NO: 6919 - DNA, 17 bp, Artificial Sequence
  Synthetic
tgaacccaggaggcgga

SEQ ID NO: 6920 - DNA, 17 bp, Artificial Sequence
  Synthetic
ttgaacccaggaggcgg

SEQ ID NO: 6921 - DNA, 17 bp, Artificial Sequence
  Synthetic
cttgaacccaggaggcg

SEQ ID NO: 6922 - DNA, 17 bp, Artificial Sequence
  Synthetic
acttgaacccaggaggc

SEQ ID NO: 6923 - DNA, 17 bp, Artificial Sequence
  Synthetic
cacttgaacccaggagg

SEQ ID NO: 6924 - DNA, 17 bp, Artificial Sequence
  Synthetic
tcacttgaacccaggag

SEQ ID NO: 6925 - DNA, 17 bp, Artificial Sequence
  Synthetic
atcacttgaacccagga

SEQ ID NO: 6926 - DNA, 17 bp, Artificial Sequence
  Synthetic
aatcacttgaacccagg

SEQ ID NO: 6927 - DNA, 17 bp, Artificial Sequence
  Synthetic
gaatcacttgaacccag

SEQ ID NO: 6928 - DNA, 17 bp, Artificial Sequence
  Synthetic
gcacgagaatcacttga

SEQ ID NO: 6929 - DNA, 17 bp, Artificial Sequence
  Synthetic
agcacgagaatcacttg

SEQ ID NO: 6930 - DNA, 17 bp, Artificial Sequence
  Synthetic
aagcacgagaatcactt

SEQ ID NO: 6931 - DNA, 17 bp, Artificial Sequence
  Synthetic
gaagcacgagaatcact

SEQ ID NO: 6932 - DNA, 17 bp, Artificial Sequence
  Synthetic
tgaagcacgagaatcac

SEQ ID NO: 6933 - DNA, 17 bp, Artificial Sequence
  Synthetic
ctgaagcacgagaatca

SEQ ID NO: 6934 - DNA, 17 bp, Artificial Sequence
  Synthetic
gctgaagcacgagaatc

SEQ ID NO: 6935 - DNA, 17 bp, Artificial Sequence
  Synthetic
ggctgaagcacgagaat

SEQ ID NO: 6936 - DNA, 17 bp, Artificial Sequence
  Synthetic
tgggaggctgaagcacg

SEQ ID NO: 6937 - DNA, 17 bp, Artificial Sequence
  Synthetic
ttgggaggctgaagcac

SEQ ID NO: 6938 - DNA, 17 bp, Artificial Sequence
  Synthetic
cttgggaggctgaagca

SEQ ID NO: 6939 - DNA, 17 bp, Artificial Sequence
  Synthetic
acttgggaggctgaagc

SEQ ID NO: 6940 - DNA, 17 bp, Artificial Sequence
  Synthetic
tacttgggaggctgaag

SEQ ID NO: 6941 - DNA, 17 bp, Artificial Sequence
  Synthetic
gtacttgggaggctgaa

SEQ ID NO: 6942 - DNA, 17 bp, Artificial Sequence
  Synthetic
ggtacttgggaggctga

SEQ ID NO: 6943 - DNA, 17 bp, Artificial Sequence
  Synthetic
aggtacttgggaggctg

SEQ ID NO: 6944 - DNA, 17 bp, Artificial Sequence
  Synthetic
caggtacttgggaggct

SEQ ID NO: 6945 - DNA, 17 bp, Artificial Sequence
  Synthetic
tcccaggtacttgggag

SEQ ID NO: 6946 - DNA, 17 bp, Artificial Sequence
  Synthetic
gtcccaggtacttggga

SEQ ID NO: 6947 - DNA, 17 bp, Artificial Sequence
  Synthetic
agtcccaggtacttggg

SEQ ID NO: 6948 - DNA, 17 bp, Artificial Sequence
  Synthetic
tagtcccaggtacttgg

SEQ ID NO: 6949 - DNA, 17 bp, Artificial Sequence
  Synthetic
gtagtcccaggtacttg

SEQ ID NO: 6950 - DNA, 17 bp, Artificial Sequence
  Synthetic
tgtagtcccaggtactt

SEQ ID NO: 6951 - DNA, 17 bp, Artificial Sequence
  Synthetic
ctgtagtcccaggtact

SEQ ID NO: 6952 - DNA, 17 bp, Artificial Sequence
  Synthetic
cctgtagtcccaggtac

SEQ ID NO: 6953 - DNA, 17 bp, Artificial Sequence
  Synthetic
acctgtagtcccaggta

SEQ ID NO: 6954 - DNA, 17 bp, Artificial Sequence
  Synthetic
cacctgtagtcccaggt

SEQ ID NO: 6955 - DNA, 17 bp, Artificial Sequence
  Synthetic
tgcacacctgtagtccc

SEQ ID NO: 6956 - DNA, 17 bp, Artificial Sequence
  Synthetic
gtgcacacctgtagtcc

SEQ ID NO: 6957 - DNA, 17 bp, Artificial Sequence
  Synthetic
ggtgcacacctgtagtc

SEQ ID NO: 6958 - DNA, 17 bp, Artificial Sequence
  Synthetic
tggtgcacacctgtagt

SEQ ID NO: 6959 - DNA, 17 bp, Artificial Sequence
  Synthetic
gtggtgcacacctgtag

SEQ ID NO: 6960 - DNA, 17 bp, Artificial Sequence
  Synthetic
ggtggtgcacacctgta

SEQ ID NO: 6961 - DNA, 17 bp, Artificial Sequence
  Synthetic
tggtggtgcacacctgt

SEQ ID NO: 6962 - DNA, 17 bp, Artificial Sequence
  Synthetic
gtggtggtgcacacctg

SEQ ID NO: 6963 - DNA, 17 bp, Artificial Sequence
  Synthetic
tgtggtggtgcacacct

SEQ ID NO: 6964 - DNA, 17 bp, Artificial Sequence
  Synthetic
gtgtggtggtgcacacc

SEQ ID NO: 6965 - DNA, 17 bp, Artificial Sequence
  Synthetic
ggtgtggtggtgcacac

SEQ ID NO: 6966 - DNA, 17 bp, Artificial Sequence
  Synthetic
tggtgtggtggtgcaca

SEQ ID NO: 6967 - DNA, 17 bp, Artificial Sequence
  Synthetic
ctggtgtggtggtgcac

SEQ ID NO: 6968 - DNA, 17 bp, Artificial Sequence
  Synthetic
cctggtgtggtggtgca

SEQ ID NO: 6969 - DNA, 17 bp, Artificial Sequence
  Synthetic
gcctggtgtggtggtgc

SEQ ID NO: 6970 - DNA, 17 bp, Artificial Sequence
  Synthetic
agcctggtgtggtggtg

SEQ ID NO: 6971 - DNA, 17 bp, Artificial Sequence
  Synthetic
tagcctggtgtggtggt

SEQ ID NO: 6972 - DNA, 17 bp, Artificial Sequence
  Synthetic
ttagcctggtgtggtgg

SEQ ID NO: 6973 - DNA, 17 bp, Artificial Sequence
  Synthetic
attagcctggtgtggtg

SEQ ID NO: 6974 - DNA, 17 bp, Artificial Sequence
  Synthetic
aattagcctggtgtggt

SEQ ID NO: 6975 - DNA, 17 bp, Artificial Sequence
  Synthetic
aaattagcctggtgtgg

SEQ ID NO: 6976 - DNA, 17 bp, Artificial Sequence
  Synthetic
aaaattagcctggtgtg

SEQ ID NO: 6977 - DNA, 17 bp, Artificial Sequence
  Synthetic
aaaaattagcctggtgt

SEQ ID NO: 6978 - DNA, 17 bp, Artificial Sequence
  Synthetic
aaaaaattagcctggtg

SEQ ID NO: 6979 - DNA, 17 bp, Artificial Sequence
  Synthetic
caaaaaattagcctggt

SEQ ID NO: 6980 - DNA, 17 bp, Artificial Sequence
  Synthetic
acaaaaaattagcctgg

SEQ ID NO: 6981 - DNA, 17 bp, Artificial Sequence
  Synthetic
cacaaaaaattagcctg

SEQ ID NO: 6982 - DNA, 17 bp, Artificial Sequence
  Synthetic
acacaaaaaattagcct

SEQ ID NO: 6983 - DNA, 17 bp, Artificial Sequence
  Synthetic
tacacaaaaaattagcc

SEQ ID NO: 6984 - DNA, 17 bp, Artificial Sequence
  Synthetic
atacacaaaaaattagc

SEQ ID NO: 6985 - DNA, 17 bp, Artificial Sequence
  Synthetic
aatacacaaaaaattag

SEQ ID NO: 6986 - DNA, 17 bp, Artificial Sequence
  Synthetic
aaatacacaaaaaatta

SEQ ID NO: 6987 - DNA, 17 bp, Artificial Sequence
  Synthetic
aaaatacacaaaaaatt

SEQ ID NO: 6988 - DNA, 17 bp, Artificial Sequence
  Synthetic
aaaaatacacaaaaaat

SEQ ID NO: 6989 - DNA, 17 bp, Artificial Sequence
  Synthetic
taaaaatacacaaaaaa

SEQ ID NO: 6990 - DNA, 17 bp, Artificial Sequence
  Synthetic
gtaaaaatacacaaaaa

SEQ ID NO: 6991 - DNA, 17 bp, Artificial Sequence
  Synthetic
agtaaaaatacacaaaa

SEQ ID NO: 6992 - DNA, 17 bp, Artificial Sequence
  Synthetic
tagtaaaaatacacaaa

SEQ ID NO: 6993 - DNA, 17 bp, Artificial Sequence
  Synthetic
ctagtaaaaatacacaa

SEQ ID NO: 6994 - DNA, 17 bp, Artificial Sequence
  Synthetic
tctagtaaaaatacaca

SEQ ID NO: 6995 - DNA, 17 bp, Artificial Sequence
  Synthetic
ctctagtaaaaatacac

SEQ ID NO: 6996 - DNA, 17 bp, Artificial Sequence
  Synthetic
tctctagtaaaaataca

SEQ ID NO: 6997 - DNA, 17 bp, Artificial Sequence
  Synthetic
gtctctagtaaaaatac

SEQ ID NO: 6998 - DNA, 17 bp, Artificial Sequence
  Synthetic
tgtctctagtaaaaata

SEQ ID NO: 6999 - DNA, 17 bp, Artificial Sequence
  Synthetic
ctgtctctagtaaaaat

SEQ ID NO: 7000 - DNA, 17 bp, Artificial Sequence
  Synthetic
cctgtctctagtaaaaa

SEQ ID NO: 7001 - DNA, 17 bp, Artificial Sequence
  Synthetic
ccctgtctctagtaaaa

SEQ ID NO: 7002 - DNA, 17 bp, Artificial Sequence
  Synthetic
aaccctgtctctagtaa

SEQ ID NO: 7003 - DNA, 17 bp, Artificial Sequence
  Synthetic
aaaccctgtctctagta

SEQ ID NO: 7004 - DNA, 17 bp, Artificial Sequence
  Synthetic
gaaaccctgtctctagt

SEQ ID NO: 7005 - DNA, 17 bp, Artificial Sequence
  Synthetic
tgaaaccctgtctctag

SEQ ID NO: 7006 - DNA, 17 bp, Artificial Sequence
  Synthetic
gtgaaaccctgtctcta

SEQ ID NO: 7007 - DNA, 17 bp, Artificial Sequence
  Synthetic
ggtgaaaccctgtctct

SEQ ID NO: 7008 - DNA, 17 bp, Artificial Sequence
  Synthetic
tggtgaaaccctgtctc

SEQ ID NO: 7009 - DNA, 17 bp, Artificial Sequence
  Synthetic
atggtgaaaccctgtct

SEQ ID NO: 7010 - DNA, 17 bp, Artificial Sequence
  Synthetic
catggtgaaaccctgtc

SEQ ID NO: 7011 - DNA, 17 bp, Artificial Sequence
  Synthetic
acatggtgaaaccctgt

SEQ ID NO: 7012 - DNA, 17 bp, Artificial Sequence
  Synthetic
aacatggtgaaaccctg

SEQ ID NO: 7013 - DNA, 17 bp, Artificial Sequence
  Synthetic
caacatggtgaaaccct

SEQ ID NO: 7014 - DNA, 17 bp, Artificial Sequence
  Synthetic
tggccaacatggtgaaa

SEQ ID NO: 7015 - DNA, 17 bp, Artificial Sequence
  Synthetic
ctggccaacatggtgaa

SEQ ID NO: 7016 - DNA, 17 bp, Artificial Sequence
  Synthetic
gctggccaacatggtga

SEQ ID NO: 7017 - DNA, 17 bp, Artificial Sequence
  Synthetic
tgctggccaacatggtg

SEQ ID NO: 7018 - DNA, 17 bp, Artificial Sequence
  Synthetic
atgctggccaacatggt

SEQ ID NO: 7019 - DNA, 17 bp, Artificial Sequence
  Synthetic
catgctggccaacatgg

SEQ ID NO: 7020 - DNA, 17 bp, Artificial Sequence
  Synthetic
ccatgctggccaacatg

SEQ ID NO: 7021 - DNA, 17 bp, Artificial Sequence
  Synthetic
accatgctggccaacat

SEQ ID NO: 7022 - DNA, 17 bp, Artificial Sequence
  Synthetic
tcaagaccatgctggcc

SEQ ID NO: 7023 - DNA, 17 bp, Artificial Sequence
  Synthetic
ttcaagaccatgctggc

SEQ ID NO: 7024 - DNA, 17 bp, Artificial Sequence
  Synthetic
gttcaagaccatgctgg

SEQ ID NO: 7025 - DNA, 17 bp, Artificial Sequence
  Synthetic
cgttcaagaccatgctg

SEQ ID NO: 7026 - DNA, 17 bp, Artificial Sequence
  Synthetic
gcgttcaagaccatgct

SEQ ID NO: 7027 - DNA, 17 bp, Artificial Sequence
  Synthetic
ggcgttcaagaccatgc

SEQ ID NO: 7028 - DNA, 17 bp, Artificial Sequence
  Synthetic
aggcgttcaagaccatg

SEQ ID NO: 7029 - DNA, 17 bp, Artificial Sequence
  Synthetic
caggcgttcaagaccat

SEQ ID NO: 7030 - DNA, 17 bp, Artificial Sequence
  Synthetic
tcaggcgttcaagacca

SEQ ID NO: 7031 - DNA, 17 bp, Artificial Sequence
  Synthetic
gtcaggcgttcaagacc

SEQ ID NO: 7032 - DNA, 17 bp, Artificial Sequence
  Synthetic
ggtcaggcgttcaagac

SEQ ID NO: 7033 - DNA, 17 bp, Artificial Sequence
  Synthetic
aggtcaggcgttcaaga

SEQ ID NO: 7034 - DNA, 17 bp, Artificial Sequence
  Synthetic
tgaggtcaggcgttcaa

SEQ ID NO: 7035 - DNA, 17 bp, Artificial Sequence
  Synthetic
ctgaggtcaggcgttca

SEQ ID NO: 7036 - DNA, 17 bp, Artificial Sequence
  Synthetic
tctgaggtcaggcgttc

SEQ ID NO: 7037 - DNA, 17 bp, Artificial Sequence
  Synthetic
atctgaggtcaggcgtt

SEQ ID NO: 7038 - DNA, 17 bp, Artificial Sequence
  Synthetic
catctgaggtcaggcgt

SEQ ID NO: 7039 - DNA, 17 bp, Artificial Sequence
  Synthetic
tcatctgaggtcaggcg

SEQ ID NO: 7040 - DNA, 17 bp, Artificial Sequence
  Synthetic
atcatctgaggtcaggc

SEQ ID NO: 7041 - DNA, 17 bp, Artificial Sequence
  Synthetic
gatcatctgaggtcagg

SEQ ID NO: 7042 - DNA, 17 bp, Artificial Sequence
  Synthetic
ggatcatctgaggtcag

SEQ ID NO: 7043 - DNA, 17 bp, Artificial Sequence
  Synthetic
tggatcatctgaggtca

SEQ ID NO: 7044 - DNA, 17 bp, Artificial Sequence
  Synthetic
gtggatcatctgaggtc

SEQ ID NO: 7045 - DNA, 17 bp, Artificial Sequence
  Synthetic
ggtggatcatctgaggt

SEQ ID NO: 7046 - DNA, 17 bp, Artificial Sequence
  Synthetic
gggtggatcatctgagg

SEQ ID NO: 7047 - DNA, 17 bp, Artificial Sequence
  Synthetic
tgggtggatcatctgag

SEQ ID NO: 7048 - DNA, 17 bp, Artificial Sequence
  Synthetic
gtgggtggatcatctga

SEQ ID NO: 7049 - DNA, 17 bp, Artificial Sequence
  Synthetic
ggtgggtggatcatctg

SEQ ID NO: 7050 - DNA, 17 bp, Artificial Sequence
  Synthetic
aggtgggtggatcatct

SEQ ID NO: 7051 - DNA, 17 bp, Artificial Sequence
  Synthetic
aaggtgggtggatcatc

SEQ ID NO: 7052 - DNA, 17 bp, Artificial Sequence
  Synthetic
caaggtgggtggatcat

SEQ ID NO: 7053 - DNA, 17 bp, Artificial Sequence
  Synthetic
ccaaggtgggtggatca

SEQ ID NO: 7054 - DNA, 17 bp, Artificial Sequence
  Synthetic
gccaaggtgggtggatc

SEQ ID NO: 7055 - DNA, 17 bp, Artificial Sequence
  Synthetic
ggccaaggtgggtggat

SEQ ID NO: 7056 - DNA, 17 bp, Artificial Sequence
  Synthetic
gaggccaaggtgggtgg

SEQ ID NO: 7057 - DNA, 17 bp, Artificial Sequence
  Synthetic
ggaggccaaggtgggtg

SEQ ID NO: 7058 - DNA, 17 bp, Artificial Sequence
  Synthetic
gggaggccaaggtgggt

SEQ ID NO: 7059 - DNA, 17 bp, Artificial Sequence
  Synthetic
tgggaggccaaggtggg

SEQ ID NO: 7060 - DNA, 17 bp, Artificial Sequence
  Synthetic
ttgggaggccaaggtgg

SEQ ID NO: 7061 - DNA, 17 bp, Artificial Sequence
  Synthetic
tttgggaggccaaggtg

SEQ ID NO: 7062 - DNA, 17 bp, Artificial Sequence
  Synthetic
ctttgggaggccaaggt

SEQ ID NO: 7063 - DNA, 17 bp, Artificial Sequence
  Synthetic
actttgggaggccaagg

SEQ ID NO: 7064 - DNA, 17 bp, Artificial Sequence
  Synthetic
cactttgggaggccaag

SEQ ID NO: 7065 - DNA, 17 bp, Artificial Sequence
  Synthetic
tcccagcactttgggag

SEQ ID NO: 7066 - DNA, 17 bp, Artificial Sequence
  Synthetic
atcccagcactttggga

SEQ ID NO: 7067 - DNA, 17 bp, Artificial Sequence
  Synthetic
aatcccagcactttggg

SEQ ID NO: 7068 - DNA, 17 bp, Artificial Sequence
  Synthetic
taatcccagcactttgg

SEQ ID NO: 7069 - DNA, 17 bp, Artificial Sequence
  Synthetic
gtaatcccagcactttg

SEQ ID NO: 7070 - DNA, 17 bp, Artificial Sequence
  Synthetic
tgtaatcccagcacttt

SEQ ID NO: 7071 - DNA, 17 bp, Artificial Sequence
  Synthetic
ctgtaatcccagcactt

SEQ ID NO: 7072 - DNA, 17 bp, Artificial Sequence
  Synthetic
cctgtaatcccagcact

SEQ ID NO: 7073 - DNA, 17 bp, Artificial Sequence
  Synthetic
gcctgtaatcccagcac

SEQ ID NO: 7074 - DNA, 17 bp, Artificial Sequence
  Synthetic
tgcctgtaatcccagca

SEQ ID NO: 7075 - DNA, 17 bp, Artificial Sequence
  Synthetic
atgcctgtaatcccagc

SEQ ID NO: 7076 - DNA, 17 bp, Artificial Sequence
  Synthetic
catgcctgtaatcccag

SEQ ID NO: 7077 - DNA, 17 bp, Artificial Sequence
  Synthetic
tcatgcctgtaatccca

SEQ ID NO: 7078 - DNA, 17 bp, Artificial Sequence
  Synthetic
ctcatgcctgtaatccc

SEQ ID NO: 7079 - DNA, 17 bp, Artificial Sequence
  Synthetic
gctcatgcctgtaatcc

SEQ ID NO: 7080 - DNA, 17 bp, Artificial Sequence
  Synthetic
ggctcatgcctgtaatc

SEQ ID NO: 7081 - DNA, 17 bp, Artificial Sequence
  Synthetic
tggctcatgcctgtaat

SEQ ID NO: 7082 - DNA, 17 bp, Artificial Sequence
  Synthetic
gtggctcatgcctgtaa

SEQ ID NO: 7083 - DNA, 17 bp, Artificial Sequence
  Synthetic
ggtggctcatgcctgta

SEQ ID NO: 7084 - DNA, 17 bp, Artificial Sequence
  Synthetic
tggtggctcatgcctgt

SEQ ID NO: 7085 - DNA, 17 bp, Artificial Sequence
  Synthetic
gtggtggctcatgcctg

SEQ ID NO: 7086 - DNA, 17 bp, Artificial Sequence
  Synthetic
cgtggtggctcatgcct

SEQ ID NO: 7087 - DNA, 17 bp, Artificial Sequence
  Synthetic
ccgtggtggctcatgcc

SEQ ID NO: 7088 - DNA, 17 bp, Artificial Sequence
  Synthetic
gccgtggtggctcatgc

SEQ ID NO: 7089 - DNA, 17 bp, Artificial Sequence
  Synthetic
ggccgtggtggctcatg

SEQ ID NO: 7090 - DNA, 17 bp, Artificial Sequence
  Synthetic
tggccgtggtggctcat

SEQ ID NO: 7091 - DNA, 17 bp, Artificial Sequence
  Synthetic
ctggccgtggtggctca

SEQ ID NO: 7092 - DNA, 17 bp, Artificial Sequence
  Synthetic
gctggccgtggtggctc

SEQ ID NO: 7093 - DNA, 17 bp, Artificial Sequence
  Synthetic
ggctggccgtggtggct

SEQ ID NO: 7094 - DNA, 17 bp, Artificial Sequence
  Synthetic
tgggctggccgtggtgg

SEQ ID NO: 7095 - DNA, 17 bp, Artificial Sequence
  Synthetic
gtgggctggccgtggtg

SEQ ID NO: 7096 - DNA, 17 bp, Artificial Sequence
  Synthetic
tgtgggctggccgtggt

SEQ ID NO: 7097 - DNA, 17 bp, Artificial Sequence
  Synthetic
ttgtgggctggccgtgg

SEQ ID NO: 7098 - DNA, 17 bp, Artificial Sequence
  Synthetic
attgtgggctggccgtg

SEQ ID NO: 7099 - DNA, 17 bp, Artificial Sequence
  Synthetic
cattgtgggctggccgt

SEQ ID NO: 7100 - DNA, 17 bp, Artificial Sequence
  Synthetic
tcattgtgggctggccg

SEQ ID NO: 7101 - DNA, 17 bp, Artificial Sequence
  Synthetic
atcattgtgggctggcc

SEQ ID NO: 7102 - DNA, 17 bp, Artificial Sequence
  Synthetic
tatcattgtgggctggc

SEQ ID NO: 7103 - DNA, 17 bp, Artificial Sequence
  Synthetic
atatcattgtgggctgg

SEQ ID NO: 7104 - DNA, 17 bp, Artificial Sequence
  Synthetic
aatatcattgtgggctg

SEQ ID NO: 7105 - DNA, 17 bp, Artificial Sequence
  Synthetic
taatatcattgtgggct

SEQ ID NO: 7106 - DNA, 17 bp, Artificial Sequence
  Synthetic
gtaatatcattgtgggc

SEQ ID NO: 7107 - DNA, 17 bp, Artificial Sequence
  Synthetic
tgtaatatcattgtggg

SEQ ID NO: 7108 - DNA, 17 bp, Artificial Sequence
  Synthetic
ttgtaatatcattgtgg

SEQ ID NO: 7109 - DNA, 17 bp, Artificial Sequence
  Synthetic
tttgtaatatcattgtg

SEQ ID NO: 7110 - DNA, 17 bp, Artificial Sequence
  Synthetic
gtttgtaatatcattgt

SEQ ID NO: 7111 - DNA, 17 bp, Artificial Sequence
  Synthetic
ggtttgtaatatcattg

SEQ ID NO: 7112 - DNA, 17 bp, Artificial Sequence
  Synthetic
aggtttgtaatatcatt

SEQ ID NO: 7113 - DNA, 17 bp, Artificial Sequence
  Synthetic
taggtttgtaatatcat

SEQ ID NO: 7114 - DNA, 17 bp, Artificial Sequence
  Synthetic
ataggtttgtaatatca

SEQ ID NO: 7115 - DNA, 17 bp, Artificial Sequence
  Synthetic
aataggtttgtaatatc

SEQ ID NO: 7116 - DNA, 17 bp, Artificial Sequence
  Synthetic
taataggtttgtaatat

SEQ ID NO: 7117 - DNA, 17 bp, Artificial Sequence
  Synthetic
ttaataggtttgtaata

SEQ ID NO: 7118 - DNA, 17 bp, Artificial Sequence
  Synthetic
tttaataggtttgtaat

SEQ ID NO: 7119 - DNA, 17 bp, Artificial Sequence
  Synthetic
ttttaataggtttgtaa

SEQ ID NO: 7120 - DNA, 17 bp, Artificial Sequence
  Synthetic
tttttaataggtttgta

SEQ ID NO: 7121 - DNA, 17 bp, Artificial Sequence
  Synthetic
atttttaataggtttgt

SEQ ID NO: 7122 - DNA, 17 bp, Artificial Sequence
  Synthetic
catttttaataggtttg

SEQ ID NO: 7123 - DNA, 17 bp, Artificial Sequence
  Synthetic
tcatttttaataggttt

SEQ ID NO: 7124 - DNA, 17 bp, Artificial Sequence
  Synthetic
atcatttttaataggtt

SEQ ID NO: 7125 - DNA, 17 bp, Artificial Sequence
  Synthetic
tatcatttttaataggt

SEQ ID NO: 7126 - DNA, 17 bp, Artificial Sequence
  Synthetic
gtatcatttttaatagg

SEQ ID NO: 7127 - DNA, 17 bp, Artificial Sequence
  Synthetic
agtatcatttttaatag

SEQ ID NO: 7128 - DNA, 17 bp, Artificial Sequence
  Synthetic
aagtatcatttttaata

SEQ ID NO: 7129 - DNA, 17 bp, Artificial Sequence
  Synthetic
taagtatcatttttaat

SEQ ID NO: 7130 - DNA, 17 bp, Artificial Sequence
  Synthetic
ctaagtatcatttttaa

SEQ ID NO: 7131 - DNA, 17 bp, Artificial Sequence
  Synthetic
tctaagtatcattttta

SEQ ID NO: 7132 - DNA, 17 bp, Artificial Sequence
  Synthetic
gtctaagtatcattttt

SEQ ID NO: 7133 - DNA, 17 bp, Artificial Sequence
  Synthetic
tgtctaagtatcatttt

SEQ ID NO: 7134 - DNA, 17 bp, Artificial Sequence
  Synthetic
ctgtctaagtatcattt

SEQ ID NO: 7135 - DNA, 17 bp, Artificial Sequence
  Synthetic
tctgtctaagtatcatt

SEQ ID NO: 7136 - DNA, 17 bp, Artificial Sequence
  Synthetic
ttctgtctaagtatcat

SEQ ID NO: 7137 - DNA, 17 bp, Artificial Sequence
  Synthetic
attctgtctaagtatca

SEQ ID NO: 7138 - DNA, 17 bp, Artificial Sequence
  Synthetic
aattctgtctaagtatc

SEQ ID NO: 7139 - DNA, 17 bp, Artificial Sequence
  Synthetic
caattctgtctaagtat

SEQ ID NO: 7140 - DNA, 17 bp, Artificial Sequence
  Synthetic
acaattctgtctaagta

SEQ ID NO: 7141 - DNA, 17 bp, Artificial Sequence
  Synthetic
gacaattctgtctaagt

SEQ ID NO: 7142 - DNA, 17 bp, Artificial Sequence
  Synthetic
tgacaattctgtctaag

SEQ ID NO: 7143 - DNA, 17 bp, Artificial Sequence
  Synthetic
ctgacaattctgtctaa

SEQ ID NO: 7144 - DNA, 17 bp, Artificial Sequence
  Synthetic
actgacaattctgtcta

SEQ ID NO: 7145 - DNA, 17 bp, Artificial Sequence
  Synthetic
tactgacaattctgtct

SEQ ID NO: 7146 - DNA, 17 bp, Artificial Sequence
  Synthetic
atactgacaattctgtc

SEQ ID NO: 7147 - DNA, 17 bp, Artificial Sequence
  Synthetic
aatactgacaattctgt

SEQ ID NO: 7148 - DNA, 17 bp, Artificial Sequence
  Synthetic
taatactgacaattctg

SEQ ID NO: 7149 - DNA, 17 bp, Artificial Sequence
  Synthetic
ataatactgacaattct

SEQ ID NO: 7150 - DNA, 17 bp, Artificial Sequence
  Synthetic
aataatactgacaattc

SEQ ID NO: 7151 - DNA, 17 bp, Artificial Sequence
  Synthetic
gaataatactgacaatt

SEQ ID NO: 7152 - DNA, 17 bp, Artificial Sequence
  Synthetic
tgaataatactgacaat

SEQ ID NO: 7153 - DNA, 17 bp, Artificial Sequence
  Synthetic
ttgaataatactgacaa

SEQ ID NO: 7154 - DNA, 17 bp, Artificial Sequence
  Synthetic
cttgaataatactgaca

SEQ ID NO: 7155 - DNA, 17 bp, Artificial Sequence
  Synthetic
tcttgaataatactgac

SEQ ID NO: 7156 - DNA, 17 bp, Artificial Sequence
  Synthetic
ttcttgaataatactga

SEQ ID NO: 7157 - DNA, 17 bp, Artificial Sequence
  Synthetic
gttcttgaataatactg

SEQ ID NO: 7158 - DNA, 17 bp, Artificial Sequence
  Synthetic
tgttcttgaataatact

SEQ ID NO: 7159 - DNA, 17 bp, Artificial Sequence
  Synthetic
atgttcttgaataatac

SEQ ID NO: 7160 - DNA, 17 bp, Artificial Sequence
  Synthetic
aatgttcttgaataata

SEQ ID NO: 7161 - DNA, 17 bp, Artificial Sequence
  Synthetic
aaatgttcttgaataat

SEQ ID NO: 7162 - DNA, 17 bp, Artificial Sequence
  Synthetic
taaatgttcttgaataa

SEQ ID NO: 7163 - DNA, 17 bp, Artificial Sequence
  Synthetic
ctaaatgttcttgaata

SEQ ID NO: 7164 - DNA, 17 bp, Artificial Sequence
  Synthetic
cctaaatgttcttgaat

SEQ ID NO: 7165 - DNA, 17 bp, Artificial Sequence
  Synthetic
gcctaaatgttcttgaa

SEQ ID NO: 7166 - DNA, 17 bp, Artificial Sequence
  Synthetic
agcctaaatgttcttga

SEQ ID NO: 7167 - DNA, 17 bp, Artificial Sequence
  Synthetic
tagcctaaatgttcttg

SEQ ID NO: 7168 - DNA, 17 bp, Artificial Sequence
  Synthetic
atagcctaaatgttctt

SEQ ID NO: 7169 - DNA, 17 bp, Artificial Sequence
  Synthetic
tatagcctaaatgttct

SEQ ID NO: 7170 - DNA, 17 bp, Artificial Sequence
  Synthetic
ctatagcctaaatgttc

SEQ ID NO: 7171 - DNA, 17 bp, Artificial Sequence
  Synthetic
cctatagcctaaatgtt

SEQ ID NO: 7172 - DNA, 17 bp, Artificial Sequence
  Synthetic
tcctatagcctaaatgt

SEQ ID NO: 7173 - DNA, 17 bp, Artificial Sequence
  Synthetic
atcctatagcctaaatg

SEQ ID NO: 7174 - DNA, 17 bp, Artificial Sequence
  Synthetic
catcctatagcctaaat

SEQ ID NO: 7175 - DNA, 17 bp, Artificial Sequence
  Synthetic
acatcctatagcctaaa

SEQ ID NO: 7176 - DNA, 17 bp, Artificial Sequence
  Synthetic
aacatcctatagcctaa

SEQ ID NO: 7177 - DNA, 17 bp, Artificial Sequence
  Synthetic
taacatcctatagccta

SEQ ID NO: 7178 - DNA, 17 bp, Artificial Sequence
  Synthetic
ttaacatcctatagcct

SEQ ID NO: 7179 - DNA, 17 bp, Artificial Sequence
  Synthetic
tttaacatcctatagcc

SEQ ID NO: 7180 - DNA, 17 bp, Artificial Sequence
  Synthetic
atttaacatcctatagc

SEQ ID NO: 7181 - DNA, 17 bp, Artificial Sequence
  Synthetic
catttaacatcctatag

SEQ ID NO: 7182 - DNA, 17 bp, Artificial Sequence
  Synthetic
tcatttaacatcctata

SEQ ID NO: 7183 - DNA, 17 bp, Artificial Sequence
  Synthetic
gtcatttaacatcctat

SEQ ID NO: 7184 - DNA, 17 bp, Artificial Sequence
  Synthetic
tgtcatttaacatccta

SEQ ID NO: 7185 - DNA, 17 bp, Artificial Sequence
  Synthetic
ttgtcatttaacatcct

SEQ ID NO: 7186 - DNA, 17 bp, Artificial Sequence
  Synthetic
tttgtcatttaacatcc

SEQ ID NO: 7187 - DNA, 17 bp, Artificial Sequence
  Synthetic
ttttgtcatttaacatc

SEQ ID NO: 7188 - DNA, 17 bp, Artificial Sequence
  Synthetic
cttttgtcatttaacat

SEQ ID NO: 7189 - DNA, 17 bp, Artificial Sequence
  Synthetic
ccttttgtcatttaaca

SEQ ID NO: 7190 - DNA, 17 bp, Artificial Sequence
  Synthetic
tccttttgtcatttaac

SEQ ID NO: 7191 - DNA, 17 bp, Artificial Sequence
  Synthetic
ttccttttgtcatttaa

SEQ ID NO: 7192 - DNA, 17 bp, Artificial Sequence
  Synthetic
cttccttttgtcattta

SEQ ID NO: 7193 - DNA, 17 bp, Artificial Sequence
  Synthetic
ccttccttttgtcattt

SEQ ID NO: 7194 - DNA, 17 bp, Artificial Sequence
  Synthetic
tccttccttttgtcatt

SEQ ID NO: 7195 - DNA, 17 bp, Artificial Sequence
  Synthetic
gtccttccttttgtcat

SEQ ID NO: 7196 - DNA, 17 bp, Artificial Sequence
  Synthetic
tgtccttccttttgtca

SEQ ID NO: 7197 - DNA, 17 bp, Artificial Sequence
  Synthetic
ttgtccttccttttgtc

SEQ ID NO: 7198 - DNA, 17 bp, Artificial Sequence
  Synthetic
tttgtccttccttttgt

SEQ ID NO: 7199 - DNA, 17 bp, Artificial Sequence
  Synthetic
ttttgtccttccttttg

SEQ ID NO: 7200 - DNA, 17 bp, Artificial Sequence
  Synthetic
tttttgtccttcctttt

SEQ ID NO: 7201 - DNA, 17 bp, Artificial Sequence
  Synthetic
atttttgtccttccttt

SEQ ID NO: 7202 - DNA, 17 bp, Artificial Sequence
  Synthetic
tatttttgtccttcctt

SEQ ID NO: 7203 - DNA, 17 bp, Artificial Sequence
  Synthetic
atatttttgtccttcct

SEQ ID NO: 7204 - DNA, 17 bp, Artificial Sequence
  Synthetic
tatatttttgtccttcc

SEQ ID NO: 7205 - DNA, 17 bp, Artificial Sequence
  Synthetic
atatatttttgtccttc

SEQ ID NO: 7206 - DNA, 17 bp, Artificial Sequence
  Synthetic
tatatatttttgtcctt

SEQ ID NO: 7207 - DNA, 17 bp, Artificial Sequence
  Synthetic
atatatatttttgtcct

SEQ ID NO: 7208 - DNA, 17 bp, Artificial Sequence
  Synthetic
catatatatttttgtcc

SEQ ID NO: 7209 - DNA, 17 bp, Artificial Sequence
  Synthetic
acatatatatttttgtc

SEQ ID NO: 7210 - DNA, 17 bp, Artificial Sequence
  Synthetic
tacatatatatttttgt

SEQ ID NO: 7211 - DNA, 17 bp, Artificial Sequence
  Synthetic
atacatatatatttttg

SEQ ID NO: 7212 - DNA, 17 bp, Artificial Sequence
  Synthetic
catacatatatattttt

SEQ ID NO: 7213 - DNA, 17 bp, Artificial Sequence
  Synthetic
acatacatatatatttt

SEQ ID NO: 7214 - DNA, 17 bp, Artificial Sequence
  Synthetic
cacatacatatatattt

SEQ ID NO: 7215 - DNA, 17 bp, Artificial Sequence
  Synthetic
tcacatacatatatatt

SEQ ID NO: 7216 - DNA, 17 bp, Artificial Sequence
  Synthetic
gtcacatacatatatat

SEQ ID NO: 7217 - DNA, 17 bp, Artificial Sequence
  Synthetic
ggtcacatacatatata

SEQ ID NO: 7218 - DNA, 17 bp, Artificial Sequence
  Synthetic
gggtcacatacatatat

SEQ ID NO: 7219 - DNA, 17 bp, Artificial Sequence
  Synthetic
agggtcacatacatata

SEQ ID NO: 7220 - DNA, 17 bp, Artificial Sequence
  Synthetic
tagggtcacatacatat

SEQ ID NO: 7221 - DNA, 17 bp, Artificial Sequence
  Synthetic
gtagggtcacatacata

SEQ ID NO: 7222 - DNA, 17 bp, Artificial Sequence
  Synthetic
ggtagggtcacatacat

SEQ ID NO: 7223 - DNA, 17 bp, Artificial Sequence
  Synthetic
gggtagggtcacataca

SEQ ID NO: 7224 - DNA, 17 bp, Artificial Sequence
  Synthetic
tgggtagggtcacatac

SEQ ID NO: 7225 - DNA, 17 bp, Artificial Sequence
  Synthetic
atgggtagggtcacata

SEQ ID NO: 7226 - DNA, 17 bp, Artificial Sequence
  Synthetic
tatgggtagggtcacat

SEQ ID NO: 7227 - DNA, 17 bp, Artificial Sequence
  Synthetic
ttatgggtagggtcaca

SEQ ID NO: 7228 - DNA, 17 bp, Artificial Sequence
  Synthetic
tttatgggtagggtcac

SEQ ID NO: 7229 - DNA, 17 bp, Artificial Sequence
  Synthetic
ttttatgggtagggtca

SEQ ID NO: 7230 - DNA, 17 bp, Artificial Sequence
  Synthetic
tttttatgggtagggtc

SEQ ID NO: 7231 - DNA, 17 bp, Artificial Sequence
  Synthetic
ttttttatgggtagggt

SEQ ID NO: 7232 - DNA, 17 bp, Artificial Sequence
  Synthetic
attttttatgggtaggg

SEQ ID NO: 7233 - DNA, 17 bp, Artificial Sequence
  Synthetic
cattttttatgggtagg

SEQ ID NO: 7234 - DNA, 17 bp, Artificial Sequence
  Synthetic
tcattttttatgggtag

SEQ ID NO: 7235 - DNA, 17 bp, Artificial Sequence
  Synthetic
ttcattttttatgggta

SEQ ID NO: 7236 - DNA, 17 bp, Artificial Sequence
  Synthetic
tttcattttttatgggt

SEQ ID NO: 7237 - DNA, 17 bp, Artificial Sequence
  Synthetic
atttcattttttatggg

SEQ ID NO: 7238 - DNA, 17 bp, Artificial Sequence
  Synthetic
tatttcattttttatgg

SEQ ID NO: 7239 - DNA, 17 bp, Artificial Sequence
  Synthetic
atatttcattttttatg

SEQ ID NO: 7240 - DNA, 17 bp, Artificial Sequence
  Synthetic
aatatttcattttttat

SEQ ID NO: 7241 - DNA, 17 bp, Artificial Sequence
  Synthetic
gaatatttcatttttta

SEQ ID NO: 7242 - DNA, 17 bp, Artificial Sequence
  Synthetic
tgaatatttcatttttt

SEQ ID NO: 7243 - DNA, 17 bp, Artificial Sequence
  Synthetic
gtgaatatttcattttt

SEQ ID NO: 7244 - DNA, 17 bp, Artificial Sequence
  Synthetic
tgtgaatatttcatttt

SEQ ID NO: 7245 - DNA, 17 bp, Artificial Sequence
  Synthetic
ctgtgaatatttcattt

SEQ ID NO: 7246 - DNA, 17 bp, Artificial Sequence
  Synthetic
tctgtgaatatttcatt

SEQ ID NO: 7247 - DNA, 17 bp, Artificial Sequence
  Synthetic
ttctgtgaatatttcat

SEQ ID NO: 7248 - DNA, 17 bp, Artificial Sequence
  Synthetic
attctgtgaatatttca

SEQ ID NO: 7249 - DNA, 17 bp, Artificial Sequence
  Synthetic
gattctgtgaatatttc

SEQ ID NO: 7250 - DNA, 17 bp, Artificial Sequence
  Synthetic
tgattctgtgaatattt

SEQ ID NO: 7251 - DNA, 17 bp, Artificial Sequence
  Synthetic
ctgattctgtgaatatt

SEQ ID NO: 7252 - DNA, 17 bp, Artificial Sequence
  Synthetic
tctgattctgtgaatat

SEQ ID NO: 7253 - DNA, 17 bp, Artificial Sequence
  Synthetic
atctgattctgtgaata

SEQ ID NO: 7254 - DNA, 17 bp, Artificial Sequence
  Synthetic
gatctgattctgtgaat

SEQ ID NO: 7255 - DNA, 17 bp, Artificial Sequence
  Synthetic
agatctgattctgtgaa

SEQ ID NO: 7256 - DNA, 17 bp, Artificial Sequence
  Synthetic
cagatctgattctgtga

SEQ ID NO: 7257 - DNA, 17 bp, Artificial Sequence
  Synthetic
tcagatctgattctgtg

SEQ ID NO: 7258 - DNA, 17 bp, Artificial Sequence
  Synthetic
ttcagatctgattctgt

SEQ ID NO: 7259 - DNA, 17 bp, Artificial Sequence
  Synthetic
tttcagatctgattctg

SEQ ID NO: 7260 - DNA, 17 bp, Artificial Sequence
  Synthetic
ttttcagatctgattct

SEQ ID NO: 7261 - DNA, 17 bp, Artificial Sequence
  Synthetic
gttttcagatctgattc

SEQ ID NO: 7262 - DNA, 17 bp, Artificial Sequence
  Synthetic
tgttttcagatctgatt

SEQ ID NO: 7263 - DNA, 17 bp, Artificial Sequence
  Synthetic
gtgttttcagatctgat

SEQ ID NO: 7264 - DNA, 17 bp, Artificial Sequence
  Synthetic
tgtgttttcagatctga

SEQ ID NO: 7265 - DNA, 17 bp, Artificial Sequence
  Synthetic
atgtgttttcagatctg

SEQ ID NO: 7266 - DNA, 17 bp, Artificial Sequence
  Synthetic
catgtgttttcagatct

SEQ ID NO: 7267 - DNA, 17 bp, Artificial Sequence
  Synthetic
acatgtgttttcagatc

SEQ ID NO: 7268 - DNA, 17 bp, Artificial Sequence
  Synthetic
gacatgtgttttcagat

SEQ ID NO: 7269 - DNA, 17 bp, Artificial Sequence
  Synthetic
tgggacatgtgttttca

SEQ ID NO: 7270 - DNA, 17 bp, Artificial Sequence
  Synthetic
ctgggacatgtgttttc

SEQ ID NO: 7271 - DNA, 17 bp, Artificial Sequence
  Synthetic
tctgggacatgtgtttt

SEQ ID NO: 7272 - DNA, 17 bp, Artificial Sequence
  Synthetic
gtctgggacatgtgttt

SEQ ID NO: 7273 - DNA, 17 bp, Artificial Sequence
  Synthetic
agtctgggacatgtgtt

SEQ ID NO: 7274 - DNA, 17 bp, Artificial Sequence
  Synthetic
cagtctgggacatgtgt

SEQ ID NO: 7275 - DNA, 17 bp, Artificial Sequence
  Synthetic
gcagtctgggacatgtg

SEQ ID NO: 7276 - DNA, 17 bp, Artificial Sequence
  Synthetic
tgcagtctgggacatgt

SEQ ID NO: 7277 - DNA, 17 bp, Artificial Sequence
  Synthetic
atgcagtctgggacatg

SEQ ID NO: 7278 - DNA, 17 bp, Artificial Sequence
  Synthetic
tatgcagtctgggacat

SEQ ID NO: 7279 - DNA, 17 bp, Artificial Sequence
  Synthetic
gtatgcagtctgggaca

SEQ ID NO: 7280 - DNA, 17 bp, Artificial Sequence
  Synthetic
agtatgcagtctgggac

SEQ ID NO: 7281 - DNA, 17 bp, Artificial Sequence
  Synthetic
cagtatgcagtctggga

SEQ ID NO: 7282 - DNA, 17 bp, Artificial Sequence
  Synthetic
cccagtatgcagtctgg

SEQ ID NO: 7283 - DNA, 17 bp, Artificial Sequence
  Synthetic
ccccagtatgcagtctg

SEQ ID NO: 7284 - DNA, 17 bp, Artificial Sequence
  Synthetic
accccagtatgcagtct

SEQ ID NO: 7285 - DNA, 17 bp, Artificial Sequence
  Synthetic
gaccccagtatgcagtc

SEQ ID NO: 7286 - DNA, 17 bp, Artificial Sequence
  Synthetic
cgaccccagtatgcagt

SEQ ID NO: 7287 - DNA, 17 bp, Artificial Sequence
  Synthetic
tgacgaccccagtatgc

SEQ ID NO: 7288 - DNA, 17 bp, Artificial Sequence
  Synthetic
atgacgaccccagtatg

SEQ ID NO: 7289 - DNA, 17 bp, Artificial Sequence
  Synthetic
catgacgaccccagtat

SEQ ID NO: 7290 - DNA, 17 bp, Artificial Sequence
  Synthetic
tcatgacgaccccagta

SEQ ID NO: 7291 - DNA, 17 bp, Artificial Sequence
  Synthetic
ctcatgacgaccccagt

SEQ ID NO: 7292 - DNA, 17 bp, Artificial Sequence
  Synthetic
cctcatgacgaccccag

SEQ ID NO: 7293 - DNA, 17 bp, Artificial Sequence
  Synthetic
acctcatgacgacccca

SEQ ID NO: 7294 - DNA, 17 bp, Artificial Sequence
  Synthetic
aaggagacacctcatga

SEQ ID NO: 7295 - DNA, 17 bp, Artificial Sequence
  Synthetic
gaaggagacacctcatg

SEQ ID NO: 7296 - DNA, 17 bp, Artificial Sequence
  Synthetic
ggaaggagacacctcat

SEQ ID NO: 7297 - DNA, 17 bp, Artificial Sequence
  Synthetic
aggaaggagacacctca

SEQ ID NO: 7298 - DNA, 17 bp, Artificial Sequence
  Synthetic
aaggaaggagacacctc

SEQ ID NO: 7299 - DNA, 17 bp, Artificial Sequence
  Synthetic
gaaggaaggagacacct

SEQ ID NO: 7300 - DNA, 17 bp, Artificial Sequence
  Synthetic
tacacagaaggaaggag

SEQ ID NO: 7301 - DNA, 17 bp, Artificial Sequence
  Synthetic
gtacacagaaggaagga

SEQ ID NO: 7302 - DNA, 17 bp, Artificial Sequence
  Synthetic
agtacacagaaggaagg

SEQ ID NO: 7303 - DNA, 17 bp, Artificial Sequence
  Synthetic
aagtacacagaaggaag

SEQ ID NO: 7304 - DNA, 17 bp, Artificial Sequence
  Synthetic
tcaaggaaaagtacaca

SEQ ID NO: 7305 - DNA, 17 bp, Artificial Sequence
  Synthetic
ttcaaggaaaagtacac

SEQ ID NO: 7306 - DNA, 17 bp, Artificial Sequence
  Synthetic
attcaaggaaaagtaca

SEQ ID NO: 7307 - DNA, 17 bp, Artificial Sequence
  Synthetic
cattcaaggaaaagtac

SEQ ID NO: 7308 - DNA, 17 bp, Artificial Sequence
  Synthetic
acattcaaggaaaagta

SEQ ID NO: 7309 - DNA, 17 bp, Artificial Sequence
  Synthetic
cacattcaaggaaaagt

SEQ ID NO: 7310 - DNA, 17 bp, Artificial Sequence
  Synthetic
tgcacattcaaggaaaa

SEQ ID NO: 7311 - DNA, 17 bp, Artificial Sequence
  Synthetic
gtgcacattcaaggaaa

SEQ ID NO: 7312 - DNA, 17 bp, Artificial Sequence
  Synthetic
agtgcacattcaaggaa

SEQ ID NO: 7313 - DNA, 17 bp, Artificial Sequence
  Synthetic
aagtgcacattcaagga

SEQ ID NO: 7314 - DNA, 17 bp, Artificial Sequence
  Synthetic
taaaagtgcacattcaa

SEQ ID NO: 7315 - DNA, 17 bp, Artificial Sequence
  Synthetic
ataaaagtgcacattca

SEQ ID NO: 7316 - DNA, 17 bp, Artificial Sequence
  Synthetic
tataaaagtgcacattc

SEQ ID NO: 7317 - DNA, 17 bp, Artificial Sequence
  Synthetic
ttataaaagtgcacatt

SEQ ID NO: 7318 - DNA, 17 bp, Artificial Sequence
  Synthetic
gttataaaagtgcacat

SEQ ID NO: 7319 - DNA, 17 bp, Artificial Sequence
  Synthetic
tgttataaaagtgcaca

SEQ ID NO: 7320 - DNA, 17 bp, Artificial Sequence
  Synthetic
atgttataaaagtgcac

SEQ ID NO: 7321 - DNA, 17 bp, Artificial Sequence
  Synthetic
catgttataaaagtgca

SEQ ID NO: 7322 - DNA, 17 bp, Artificial Sequence
  Synthetic
tcatgttataaaagtgc

SEQ ID NO: 7323 - DNA, 17 bp, Artificial Sequence
  Synthetic
ttcatgttataaaagtg

SEQ ID NO: 7324 - DNA, 17 bp, Artificial Sequence
  Synthetic
tttcatgttataaaagt

SEQ ID NO: 7325 - DNA, 17 bp, Artificial Sequence
  Synthetic
ttttcatgttataaaag

SEQ ID NO: 7326 - DNA, 17 bp, Artificial Sequence
  Synthetic
tttttcatgttataaaa

SEQ ID NO: 7327 - DNA, 17 bp, Artificial Sequence
  Synthetic
atttttcatgttataaa

SEQ ID NO: 7328 - DNA, 17 bp, Artificial Sequence
  Synthetic
tatttttcatgttataa

SEQ ID NO: 7329 - DNA, 17 bp, Artificial Sequence
  Synthetic
ttatttttcatgttata

SEQ ID NO: 7330 - DNA, 17 bp, Artificial Sequence
  Synthetic
tttatttttcatgttat

SEQ ID NO: 7331 - DNA, 17 bp, Artificial Sequence
  Synthetic
ctttatttttcatgtta

SEQ ID NO: 7332 - DNA, 17 bp, Artificial Sequence
  Synthetic
cctttatttttcatgtt

SEQ ID NO: 7333 - DNA, 17 bp, Artificial Sequence
  Synthetic
acctttatttttcatgt

SEQ ID NO: 7334 - DNA, 17 bp, Artificial Sequence
  Synthetic
cacctttatttttcatg

SEQ ID NO: 7335 - DNA, 17 bp, Artificial Sequence
  Synthetic
ccacctttatttttcat

SEQ ID NO: 7336 - DNA, 17 bp, Artificial Sequence
  Synthetic
cccacctttatttttca

SEQ ID NO: 7337 - DNA, 17 bp, Artificial Sequence
  Synthetic
ccccacctttatttttc

SEQ ID NO: 7338 - DNA, 17 bp, Artificial Sequence
  Synthetic
tccccacctttattttt

SEQ ID NO: 7339 - DNA, 17 bp, Artificial Sequence
  Synthetic
ttccccacctttatttt

SEQ ID NO: 7340 - DNA, 17 bp, Artificial Sequence
  Synthetic
tttccccacctttattt

SEQ ID NO: 7341 - DNA, 17 bp, Artificial Sequence
  Synthetic
ttttccccacctttatt

SEQ ID NO: 7342 - DNA, 17 bp, Artificial Sequence
  Synthetic
tttttccccacctttat

SEQ ID NO: 7343 - DNA, 17 bp, Artificial Sequence
  Synthetic
ttttttccccaccttta

SEQ ID NO: 7344 - DNA, 17 bp, Artificial Sequence
  Synthetic
cttttttccccaccttt

SEQ ID NO: 7345 - DNA, 17 bp, Artificial Sequence
  Synthetic
acttttttccccacctt

SEQ ID NO: 7346 - DNA, 17 bp, Artificial Sequence
  Synthetic
gacttttttccccacct

SEQ ID NO: 7347 - DNA, 17 bp, Artificial Sequence
  Synthetic
tcagacttttttcccca

SEQ ID NO: 7348 - DNA, 17 bp, Artificial Sequence
  Synthetic
ttcagacttttttcccc

SEQ ID NO: 7349 - DNA, 17 bp, Artificial Sequence
  Synthetic
cttcagacttttttccc

SEQ ID NO: 7350 - DNA, 17 bp, Artificial Sequence
  Synthetic
tcttcagacttttttcc

SEQ ID NO: 7351 - DNA, 17 bp, Artificial Sequence
  Synthetic
atcttcagacttttttc

SEQ ID NO: 7352 - DNA, 17 bp, Artificial Sequence
  Synthetic
gatcttcagactttttt

SEQ ID NO: 7353 - DNA, 17 bp, Artificial Sequence
  Synthetic
gagggaggagggtctgg

SEQ ID NO: 7354 - DNA, 17 bp, Artificial Sequence
  Synthetic
cgagggaggagggtctg

SEQ ID NO: 7355 - DNA, 17 bp, Artificial Sequence
  Synthetic
ccgagggaggagggtct

SEQ ID NO: 7356 - DNA, 17 bp, Artificial Sequence
  Synthetic
tccgagggaggagggtc

SEQ ID NO: 7357 - DNA, 17 bp, Artificial Sequence
  Synthetic
ttccgagggaggagggt

SEQ ID NO: 7358 - DNA, 17 bp, Artificial Sequence
  Synthetic
gttccgagggaggaggg

SEQ ID NO: 7359 - DNA, 17 bp, Artificial Sequence
  Synthetic
ggttccgagggaggagg

SEQ ID NO: 7360 - DNA, 17 bp, Artificial Sequence
  Synthetic
tggttccgagggaggag

SEQ ID NO: 7361 - DNA, 17 bp, Artificial Sequence
  Synthetic
ctggttccgagggagga

SEQ ID NO: 7362 - DNA, 17 bp, Artificial Sequence
  Synthetic
cctggttccgagggagg

SEQ ID NO: 7363 - DNA, 17 bp, Artificial Sequence
  Synthetic
tcctggttccgagggag

SEQ ID NO: 7364 - DNA, 17 bp, Artificial Sequence
  Synthetic
ctcctggttccgaggga

SEQ ID NO: 7365 - DNA, 17 bp, Artificial Sequence
  Synthetic
gctcctggttccgaggg

SEQ ID NO: 7366 - DNA, 17 bp, Artificial Sequence
  Synthetic
ggctcctggttccgagg

SEQ ID NO: 7367 - DNA, 17 bp, Artificial Sequence
  Synthetic
aggctcctggttccgag

SEQ ID NO: 7368 - DNA, 17 bp, Artificial Sequence
  Synthetic
caggctcctggttccga

SEQ ID NO: 7369 - DNA, 17 bp, Artificial Sequence
  Synthetic
tcaggctcctggttccg

SEQ ID NO: 7370 - DNA, 17 bp, Artificial Sequence
  Synthetic
ttcaggctcctggttcc

SEQ ID NO: 7371 - DNA, 17 bp, Artificial Sequence
  Synthetic
gttcaggctcctggttc

SEQ ID NO: 7372 - DNA, 17 bp, Artificial Sequence
  Synthetic
tgttcaggctcctggtt

SEQ ID NO: 7373 - DNA, 17 bp, Artificial Sequence
  Synthetic
ttgttcaggctcctggt

SEQ ID NO: 7374 - DNA, 17 bp, Artificial Sequence
  Synthetic
gttgttcaggctcctgg

SEQ ID NO: 7375 - DNA, 17 bp, Artificial Sequence
  Synthetic
tgttgttcaggctcctg

SEQ ID NO: 7376 - DNA, 17 bp, Artificial Sequence
  Synthetic
ctgttgttcaggctcct

SEQ ID NO: 7377 - DNA, 17 bp, Artificial Sequence
  Synthetic
gctgttgttcaggctcc

SEQ ID NO: 7378 - DNA, 17 bp, Artificial Sequence
  Synthetic
ggctgttgttcaggctc

SEQ ID NO: 7379 - DNA, 17 bp, Artificial Sequence
  Synthetic
gggctgttgttcaggct

SEQ ID NO: 7380 - DNA, 17 bp, Artificial Sequence
  Synthetic
agggctgttgttcaggc

SEQ ID NO: 7381 - DNA, 17 bp, Artificial Sequence
  Synthetic
aagggctgttgttcagg

SEQ ID NO: 7382 - DNA, 17 bp, Artificial Sequence
  Synthetic
gaagggctgttgttcag

SEQ ID NO: 7383 - DNA, 17 bp, Artificial Sequence
  Synthetic
agaagggctgttgttca

SEQ ID NO: 7384 - DNA, 17 bp, Artificial Sequence
  Synthetic
cagaagggctgttgttc

SEQ ID NO: 7385 - DNA, 17 bp, Artificial Sequence
  Synthetic
ccagaagggctgttgtt

SEQ ID NO: 7386 - DNA, 17 bp, Artificial Sequence
  Synthetic
accagaagggctgttgt

SEQ ID NO: 7387 - DNA, 17 bp, Artificial Sequence
  Synthetic
gaccagaagggctgttg

SEQ ID NO: 7388 - DNA, 17 bp, Artificial Sequence
  Synthetic
ggaccagaagggctgtt

SEQ ID NO: 7389 - DNA, 17 bp, Artificial Sequence
  Synthetic
aggaccagaagggctgt

SEQ ID NO: 7390 - DNA, 17 bp, Artificial Sequence
  Synthetic
gaggaccagaagggctg

SEQ ID NO: 7391 - DNA, 17 bp, Artificial Sequence
  Synthetic
cgaggaccagaagggct

SEQ ID NO: 7392 - DNA, 17 bp, Artificial Sequence
  Synthetic
tgggggcgaggaccaga

SEQ ID NO: 7393 - DNA, 17 bp, Artificial Sequence
  Synthetic
atgggggcgaggaccag

SEQ ID NO: 7394 - DNA, 17 bp, Artificial Sequence
  Synthetic
gatgggggcgaggacca

SEQ ID NO: 7395 - DNA, 17 bp, Artificial Sequence
  Synthetic
ggatgggggcgaggacc

SEQ ID NO: 7396 - DNA, 17 bp, Artificial Sequence
  Synthetic
aggatgggggcgaggac

SEQ ID NO: 7397 - DNA, 17 bp, Artificial Sequence
  Synthetic
gaggatgggggcgagga

SEQ ID NO: 7398 - DNA, 17 bp, Artificial Sequence
  Synthetic
agaggatgggggcgagg

SEQ ID NO: 7399 - DNA, 17 bp, Artificial Sequence
  Synthetic
gagaggatgggggcgag

SEQ ID NO: 7400 - DNA, 17 bp, Artificial Sequence
  Synthetic
agagaggatgggggcga

SEQ ID NO: 7401 - DNA, 17 bp, Artificial Sequence
  Synthetic
cagagaggatgggggcg

SEQ ID NO: 7402 - DNA, 17 bp, Artificial Sequence
  Synthetic
tcagagaggatgggggc

SEQ ID NO: 7403 - DNA, 17 bp, Artificial Sequence
  Synthetic
gtcagagaggatggggg

SEQ ID NO: 7404 - DNA, 17 bp, Artificial Sequence
  Synthetic
agtcagagaggatgggg

SEQ ID NO: 7405 - DNA, 17 bp, Artificial Sequence
  Synthetic
cagtcagagaggatggg

SEQ ID NO: 7406 - DNA, 17 bp, Artificial Sequence
  Synthetic
tcagtcagagaggatgg

SEQ ID NO: 7407 - DNA, 17 bp, Artificial Sequence
  Synthetic
gtcagtcagagaggatg

SEQ ID NO: 7408 - DNA, 17 bp, Artificial Sequence
  Synthetic
tgtcagtcagagaggat

SEQ ID NO: 7409 - DNA, 17 bp, Artificial Sequence
  Synthetic
ctgtcagtcagagagga

SEQ ID NO: 7410 - DNA, 17 bp, Artificial Sequence
  Synthetic
gctgtcagtcagagagg

SEQ ID NO: 7411 - DNA, 17 bp, Artificial Sequence
  Synthetic
agctgtcagtcagagag

SEQ ID NO: 7412 - DNA, 17 bp, Artificial Sequence
  Synthetic
gagctgtcagtcagaga

SEQ ID NO: 7413 - DNA, 17 bp, Artificial Sequence
  Synthetic
agagctgtcagtcagag

SEQ ID NO: 7414 - DNA, 17 bp, Artificial Sequence
  Synthetic
gagagctgtcagtcaga

SEQ ID NO: 7415 - DNA, 17 bp, Artificial Sequence
  Synthetic
ggagagctgtcagtcag

SEQ ID NO: 7416 - DNA, 17 bp, Artificial Sequence
  Synthetic
gggagagctgtcagtca

SEQ ID NO: 7417 - DNA, 17 bp, Artificial Sequence
  Synthetic
agggagagctgtcagtc

SEQ ID NO: 7418 - DNA, 17 bp, Artificial Sequence
  Synthetic
cagggagagctgtcagt

SEQ ID NO: 7419 - DNA, 17 bp, Artificial Sequence
  Synthetic
gcagggagagctgtcag

SEQ ID NO: 7420 - DNA, 17 bp, Artificial Sequence
  Synthetic
agcagggagagctgtca

SEQ ID NO: 7421 - DNA, 17 bp, Artificial Sequence
  Synthetic
gagcagggagagctgtc

SEQ ID NO: 7422 - DNA, 17 bp, Artificial Sequence
  Synthetic
ggagcagggagagctgt

SEQ ID NO: 7423 - DNA, 17 bp, Artificial Sequence
  Synthetic
aggagcagggagagctg

SEQ ID NO: 7424 - DNA, 17 bp, Artificial Sequence
  Synthetic
gaggagcagggagagct

SEQ ID NO: 7425 - DNA, 17 bp, Artificial Sequence
  Synthetic
tgcagggaggagcaggg

SEQ ID NO: 7426 - DNA, 17 bp, Artificial Sequence
  Synthetic
ctgcagggaggagcagg

SEQ ID NO: 7427 - DNA, 17 bp, Artificial Sequence
  Synthetic
actgcagggaggagcag

SEQ ID NO: 7428 - DNA, 17 bp, Artificial Sequence
  Synthetic
cactgcagggaggagca

SEQ ID NO: 7429 - DNA, 17 bp, Artificial Sequence
  Synthetic
tcactgcagggaggagc

SEQ ID NO: 7430 - DNA, 17 bp, Artificial Sequence
  Synthetic
gtcactgcagggaggag

SEQ ID NO: 7431 - DNA, 17 bp, Artificial Sequence
  Synthetic
ggtcactgcagggagga

SEQ ID NO: 7432 - DNA, 17 bp, Artificial Sequence
  Synthetic
aggtcactgcagggagg

SEQ ID NO: 7433 - DNA, 17 bp, Artificial Sequence
  Synthetic
aaggtcactgcagggag

SEQ ID NO: 7434 - DNA, 17 bp, Artificial Sequence
  Synthetic
aaaggtcactgcaggga

SEQ ID NO: 7435 - DNA, 17 bp, Artificial Sequence
  Synthetic
gaaaggtcactgcaggg

SEQ ID NO: 7436 - DNA, 17 bp, Artificial Sequence
  Synthetic
ggaaaggtcactgcagg

SEQ ID NO: 7437 - DNA, 17 bp, Artificial Sequence
  Synthetic
gggaaaggtcactgcag

SEQ ID NO: 7438 - DNA, 17 bp, Artificial Sequence
  Synthetic
agggaaaggtcactgca

SEQ ID NO: 7439 - DNA, 17 bp, Artificial Sequence
  Synthetic
gagggaaaggtcactgc

SEQ ID NO: 7440 - DNA, 17 bp, Artificial Sequence
  Synthetic
agagggaaaggtcactg

SEQ ID NO: 7441 - DNA, 17 bp, Artificial Sequence
  Synthetic
cagagggaaaggtcact

SEQ ID NO: 7442 - DNA, 14 bp, Artificial Sequence
  Synthetic
ttccctgcctgctg

SEQ ID NO: 7443 - DNA, 17 bp, Artificial Sequence
  Synthetic
cttccctgcctgctgag

SEQ ID NO: 7444 - DNA, 23 bp, Artificial Sequence
  Synthetic
ctccttccctgcctgctgagcca

SEQ ID NO: 7445 - DNA, 14 bp, Artificial Sequence
  Synthetic
cttgggggctcttg

SEQ ID NO: 7446 - DNA, 23 bp, Artificial Sequence
  Synthetic
tgcacttgggggctcttggttgt

SEQ ID NO: 7447 - DNA, 26 bp, Artificial Sequence
  Synthetic
agtgcacttgggggctcttggttgtc

SEQ ID NO: 7448 - DNA, 17 bp, Artificial Sequence
  Synthetic
gttggcctggatggttt

SEQ ID NO: 7449 - DNA, 23 bp, Artificial Sequence
  Synthetic
atgaacattctcaacatctctgg

SEQ ID NO: 7450 - DNA, 23 bp, Artificial Sequence
  Synthetic
tgaacattctcaacatcatctct

SEQ ID NO: 7451 - DNA, 23 bp, Artificial Sequence
  Synthetic
ctggagagatgaacatcattctc

SEQ ID NO: 7452 - DNA, 17 bp, Artificial Sequence
  Synthetic
ggagagatgaacattct

SEQ ID NO: 7453 - DNA, 23 bp, Artificial Sequence
  Synthetic
gctggagagatgaacattctcaa

SEQ ID NO: 7454 - DNA, 26 bp, Artificial Sequence
  Synthetic
gggctggagagatgaacattctcaac

SEQ ID NO: 7455 - DNA, 26 bp, Artificial Sequence
  Synthetic
attgagacgcaacccccgccctggac

SEQ ID NO: 7456 - DNA, 14 bp, Artificial Sequence
  Synthetic
agaggatctgatgt

SEQ ID NO: 7457 - DNA, 20 bp, Artificial Sequence
  Synthetic
tcgagaggatctgatgtgat

SEQ ID NO: 7458 - DNA, 23 bp, Artificial Sequence
  Synthetic
gctcgagaggatctgatgtgatc

SEQ ID NO: 7459 - DNA, 20 bp, Artificial Sequence
  Synthetic
gtggagctgattgccactga

SEQ ID NO: 7460 - DNA, 23 bp, Artificial Sequence
  Synthetic
cagtggagctgattgccactgag

SEQ ID NO: 7461 - DNA, 20 bp, Artificial Sequence
  Synthetic
tgagcacccagcgctcattg

SEQ ID NO: 7462 - DNA, 23 bp, Artificial Sequence
  Synthetic
agtgagcacccagcgctcattga

SEQ ID NO: 7463 - DNA, 14 bp, Artificial Sequence
  Synthetic
ccaggtgcacggtg

SEQ ID NO: 7464 - DNA, 20 bp, Artificial Sequence
  Synthetic
tgcccaggtgcacggtgtac

SEQ ID NO: 7465 - DNA, 23 bp, Artificial Sequence
  Synthetic
actgcccaggtgcacggtgtact

SEQ ID NO: 7466 - DNA, 20 bp, Artificial Sequence
  Synthetic
tgaggtcagagggaaaggtc

SEQ ID NO: 7467 - DNA, 20 bp, Artificial Sequence
  Synthetic
gtccccctgagtcaccattg

SEQ ID NO: 7468 - DNA, 23 bp, Artificial Sequence
  Synthetic
cggtccccctgagtcaccattgc

SEQ ID NO: 7469 - DNA, 23 bp, Artificial Sequence
  Synthetic
ttgggaggctgaagcacgagaat

SEQ ID NO: 7470 - DNA, 14 bp, Artificial Sequence
  Synthetic
taatcccagcactt

SEQ ID NO: 7471 - DNA, 20 bp, Artificial Sequence
  Synthetic
ctgtaatcccagcactttgg

SEQ ID NO: 7472 - DNA, 11 bp, Artificial Sequence
  Synthetic
catgaggtcag

SEQ ID NO: 7473 - DNA, 14 bp, Artificial Sequence
  Synthetic
cacatgaggtcaga

SEQ ID NO: 7474 - DNA, 20 bp, Artificial Sequence
  Synthetic
acgcacatgaggtcagaggg

SEQ ID NO: 7475 - DNA, 11 bp, Artificial Sequence
  Synthetic
ccaggactggg

SEQ ID NO: 7476 - DNA, 14 bp, Artificial Sequence
  Synthetic
acccaggactgggg

SEQ ID NO: 7477 - DNA, 9786 bp, Homo Sapiens
gccccagggagcagtgggtggttataactcaggcccggtgcccagagcccaggaggaggcagtggccaggaaggcacaggcctgagaagtctgcggctgagctgggagcaaatcccccaccccctacctgggggacagggcaagtgagacctggtgagggtggctcagcaggcagggaaggagaggtgtctgtgcgtcctgcacccacatctttctctgtcccctccttgccctgtctggaggctgctagactcctatcttctgaattctatagtgcctgggtctcagcgcagtgccgatggtggcccgtccttgtggttcctctctacctggggaaataaggtaggggagggaggggaagtgggttaagggctccccggatcgcctgggcctcccaaccctctgacattccccatccaggtgcagcggccatggctacagcaagacccccctggatgtgggtgctctgtgctctgatcacagccttgcttctgggggtcacaggtaaccagaactctggggtgggagggttgtgggattgggaggactgtctctgcggcactagagcgcctgtcccctggggaactgtgtgagcctgggcatgactccgggaccgggtgaatgtgagtctctgtctgtacttgtggttgtgcgatcgtatgtggccctgtgactgccacggtgtgtgtcggggagggggatgccttttcccatatcaggtgactgtgcggcaggtggcactgaccctttgaggctgtgtgtgtggttttgtgattgtgtgtgcatttaagattgtgtgtggctccacagctgtgtgggtgaatgcatgtagcactgggggtgttcactgtgtgtttggctgtgtgtggtgacttggcattgtatatgactgcaggtatctgcagttcctgtccctgaggtcccgggattgcgtgcaacaaaagtggtcatcaccatggaaagctgtgactgtgtgctgcttgcaggcgattatgtgattgtggctgagtgtgacgttatggatgcccgtatttgtgaccgtgtgactacctgaagctctgtgtaggggtgactgtatgtgactgtgtgtgtctgtgtgaggccgtgtaaatgctactgtatgtgtgatggtgcagctgtgtgtctggagtttctgtctctgcctggagggatagagggtgcaggggtagctatctctgggagatgggtgccaggtgactgacttgcagtgtgtgcctgtgtgcagaagagtatgtggcagtctgaacatctgtgcacacacggcatctgtgcgtggcactgagacactgtggatgagggtgtgcgatcccgctaggctgcccgggagcgtgtgtacctggagacagagctgtatgttagctgcacctgtggaggcaacatgggcgtgtctgcagaactgcgtgcgtgcttggctgttactgctgttgtgcgcgtggttcttggggtgagttcgtgaatgatggtggtgccagggccatcagcaagggtaagaaccaggccgggcgcggtggctcacgcctgtaatcccagccctttgggaggccgaggcaggcggatcacctgaggtcgggagatcgaggccagcctgaccaacatggagaaccccgtctctactaaaaatacaaaaaattagctggtgtggtggcgcgtgcctgtaatcccagctactcgggagactggggcagaaaaatcgcttgaacccgggaggtggaggttgcggtgagccgagatcgcgccattgcactccagcctgggcaacaagagcgaaactccgtctcgaaagaaaaaaagaaaaaaaaaagggtaagaaccagtgaatgggcacgggaggactgatgatggagtggggcatgcatgtagtctgtaggtctgtgtgtgagaggaggagattgacaggattgagaaggcatgttttcatctgagaattcagaaacctaggcctgctcttcccctccatgtggccccctaagctgagcccttctttcctggtcctgctttcggaaccctagctccgcccatgagctctgaccccacctcctttcctcaaccacgcccctaggccagactctagtggaccccgcctaaggccacacccctttgggccaggctccaccccctattctgtgggtaccttctagaacccccttcaaagtcagagcttttttttttttttttttggagacagtcttgctctctctcccaggctggagtgcagtggcgtgatctcggctcactgcaacctctgcctcccaggttcaagtgattctcgtgcctccacctcctgagtagctgggattacaggtgcgcgccaccacgcctggctaatttttgtgtctttagtagagacagggtttcaccttgttggccaggctggtctcaaactcccaacctcaggtgatccgcccacctcggcctcccagagtgctggggttacaggcgtgagccaccgcccccagcccaaagtcagagctctttataggagactctaacatgtaaccctgaccctggccctaactaagtcaattccaaaccccttcctgcctccagccctgaccccactcactgaggcctgaccccacttcttgagaccagttccatccctaaagccctggtctccctcccatccccaggctccagcccccacagctttggcactacccctgagcttgtccaggaatcctgtacccaattttaccctcacatgtagttctagccaattccaggaatctgtgaggtccagttagagtccagtaaccctacctgagcctgggctctgtccttgagcttgagcctgggcttgagaggtgccactcttattctccaggccctgcccctgccccctcagcatgtcagacacccaccctctagctggtctggcctcttgagtctgaaacccacccccagcccaagccccgcctctgagccccgcccaacccattttccgttcccagagcatgttctcgccaacaatgatgtttcctgtgaccacccctctaacaccgtgccctctgggagcaaccaggacctgggagctggggccggggaagacgcccggtcggatgacagcagcagccgcatcatcaatggatccgactgcgatatgcacacccagccgtggcaggccgcgctgttgctaaggcccaaccagctctactgcggggcggtgttggtgcatccacagtggctgctcacggccgcccactgcaggaagaagtgagtgggagttccaagaggagggttggtggggacggggaagtgggggtgggggtggggaagtgggggtgggggtgtcatggaggtgagggctggtggggacggggaagtggggttgggggtgtcatggaaggtgagggttggtggggatgggttggggatgtgggagcaggaggaggtcgagttggggataggactaaggatggagttttgcgggggagcaaggtgggaggatgaggttggagaggggagagtgttgtggtagggaatgggaaggagccaaggatgggttggatttggggttaggagcatatatttgttgaatggtttgggatggaggtggaattgggattggctttagaattgggggtgggtgaaaatcgggctggggtggaaatgaagatagcatggagatagggttgagattgggagcagatatagaatgaaggatggggattggagttttgggtggggttggagatggttggatttgggcttgagaatgcatatggtgatggcttctgggtagggaaagaattagggttgggaatgggatgggtttggaattgtgactgggatggggacaggcatgggattggagaccaagagggagttgaggatggtttggggaccgggggtggggatgggggtggggctggggctgggtgtggggttgggattggcgttggacgtggagatagagatcagggttggtggtgacctgccccatcttcctcagagttttcagagtccgtctcggccactactccctgtcaccagtttatgaatctgggcagcagatgttccagggggtcaaatccatcccccaccctggctactcccaccctggccactctaacgacctcatgctcatcaaactgaacagaagaattcgtcccactaaagatgtcagacccatcaacgtctcctctcattgtccctctgctgggacaaagtgcttggtgtctggctgggggacaaccaagagcccccaaggtgagtgtccaggttcttcttgataccgacccatctctgccgccttccatctttctccacttctcattgtgttcctgtttgacagtgcacttccctaaggtcctccagtgcttgaatatcagcgtgctaagtcagaaaaggtgcgaggatgcttacccgagacagatagatgacaccatgttctgcgccggtgacaaagcaggtagagactcctgccaggtgaggacacctctctttattcagcagatacacactgagtgccaactcggtaacatggagcgttgccaaattctgagaatccagcaattgccaagacagtcaggacccctgttctcacagagctcataccctagagtagtggtgtttagtagaaataatgctgagctgcttatgtcatttccagttttttagtagccacattaaaacaggtaaaaaaggctgggcgcagtggctcacacctgtaatcccagcactttgggaggctgaggcaggcagatcacctttggtcaggagtttgagactagcctggccaacatggcgaaactctgtctctaaaaaaaaatacaaaaattagcctggcatggtggcgggcgcctgtaatctcagctgctcaggaggccgagacacaagaatcacttaaacccaggaggtggaggttgcagtgagctgagatcgtgccactcactccaacctgggagacagagtgacacttttgtctcaaaaagaaaaaaaaaaacaagtaaaaaagaaacaggtgaagttaactttaataacccaatgtatcccaaatacaatcatttcaaagtgtaattaatataaaacaattatgaatgagatactttacattcttttcttgttttcatattaagtctttgaaagtgagtatatatgttatgctgacagcacatctcaatttggactagctacatttcaggtgctcagtagccacatgtggctagcagttactgtattggatggcacggatctagagggaaagatcagggctgttttgtatggttgggcaggttgtgcactgcataaagataccatatctaataggggcactccgtgttacagatgtcagttttggcagttttcaggcgtgtggtagttaagtgtcttgtttcaacaaaatctgtaatatgacagttttctagcaagtgctggtaaaatatcttgaggaaggaaaagagaaatctggtaggtatttttacaagagaatatttaatacaggggattaattgcaaagctgctggaagggctggaggaacaaagttaaaaaataaaaaactctgtggtcaagaatctgcataaatagggcaatttcagagagtggtaaaggttaaccccaaaataaaacatggttttaggatagtaaacaataagggccaatattcaaaaaggtggtcaggggagcctccttggagaggtggcatttgagcagagaatggatgacacaaagaagctaaactcgtgaagtttaaggggaaagaaaaggcacgtgcaaaggccctgaggcagtaaggaatttggctgattcaaagaagaagaggaaaccaatgcaactggagaacaaaagtgggggcaacagtagaaagtgacgctggaggtgtaggcaggggcgaatgctctgcaagtatttcttggtcaccaacacagagcttccctatgttctaatggaagctgtatctgttgaggaagacagaatttaaaatcaaactgttacatcaaccagcacccttctctgtattcaggctcccaagggatctagaaggacgtaagttaacaagctctcattagcagggtgtgtgtttcaacagtagttaggaagctggggattcaggagtactccagtcccatggctatgaaaagctccccccaaattgtacaaacctgacaaatgcaacacctccccagctctccccatttcttctctgtgccctgggtgtgggggggtgggttgcgagggggaaaacttttaacagaagaaagcacatctcggccgggcgtggtggctcacacctgtaatcccaacactttgggaggccgaggcgggtggatcactaggtcaggagatggagaccatcctggctgacacggtgaaaccctgtctctactaaaaacacaaaaaattagccgggcgtggtggcaggcgcctgtagtcccagctactcgggaggctgaggcaggagaatggcctgaacccgggaggcggaacttgcagtgagccgaggttgcaccactgcactccagcctgggcaacacagtgagactccgtctcaaaaaaaaaaaaagaaaagaaaagaaatcacatctcattcaagtggtggcatttaaaactatttagcctttctgtaggcaaggttagtatcttgtttttccagacctcaaggtgtttttttgtttgttttttcataccggtgtgtggtctgggtgtggccactaaaagctacaagcaagaaataataacaactacaacaatactaataccaatagtataaaaataatagcatctggctaattgctggacactgttttaagtggtttgcatgcctcagctcattaactcatttacctgttattattggccctattttacaaacaaggagccaaggctcagagcagttaactaacagcctctcaaaagaaactctgcagagatattaaatttaaaaaataatgagagaaattaaaccacaagaaagttgaaatttagaggtacaggcagctaagcttgtttgctttgaaacagtgtctgctactgggaaaaaggcaagtcttggctttcctaataattgataccaggactctgtaattcatattttgcatgcatgtaagtaagaaatgaagccgggtgcaatggcacatgccagtaatcccagcactctgggagactgaagtgggaagatcacttgagctcaggagttcaagaccagcctgggcaactaaaaattaaaaaaataaaaatactaattgtttttattttagtagattttattcataccacttacatcattattgtagtatgtacatatttatttcttttcttttcttttcttttcttttttgagacggagtctcgctctgtcacccaggctggagtgcaatggcaccatatcagctcactgcagcatgcgcctcctgggttcaagcatttcttccacctcagcctcccaagtagctgggataacaggcacccaccaccatgcctggctatttttttttttccgtagagatggggttccaccatgttggccaggctggtcttgaactcctgacctccagtgatctgcctgcctcggcctcccaaattgctggtattacaggtgtgagccaccgtgcccaggtgggagatagacatttctctctacctcaaacagaggtccactcaagctacttttcattttcttcataaatattagccgagtggctattttgcaccaggaatggttccaggtgctgtggatatggcatcaggcaaaacagaccaaaaacttcctgccgcgtggacctcatgttccccaagtggaagacaggcaataaagagatagataaatatgtagtaaattaaaaaaaaaaaaaattagccgggtgtggtggcttgcacctgtagttccagctacttgggaggctgaggtgggagaattgcttgagcccaaacgtttgaggctgcggtaagccatgactgcactgctgcactccagacagcagcctgggtgacaaagcaagacgtttttgtcagaaagaaaaaaaaaagagacgaagggaggaaggagagagaaaggaaggaaggaaggagaaagaaaggaaggaaggagaaagaaaggaaggaaggaaggagaaagaaaggaagaaagagaaagaaagaaaaagaaagaaagaaagaagaaagaaaagagagaggaaggaaggaaagaaggaaaagagggaaaaaaatgactgttgaagagcagtgagtattattataggagggtaattatagggaggtatggggaattgaagacaggaaacacaaattagtccaagcgaatggatttctattgggagtgattctgcccctagaagacactggcaataccaggagacatttttggttgtcacaactatatggaggggcattactggcaactaatggatagatgccaagtgtgctgttcaacatgctatgatgcacacggcaggcctccacaacaaaccattatccagcttcagatgcccacagtgcccagatcgaggaaccctcatccaggggctgagaaccgtatttttgcagaagggaggtataaggatgggttggtggagaatggggaaggaaggtgtgtgtccagtaagagaaataaggcctgcacaggctggaggggagagtgagagagaaagggaggcggagagatacacgatgagggagacaggctggaacagaaagtagagacgaagattcgagatgtggagaggaagggtcacagacccccccgaaatgatgtgtggacaacaggaatctggaagaggaagatggagtggagagtgacaaatggggtctaaaggttgaacttggaggccaggcatggtggctcacgcctgtaatcccaacactttggaggctgaggtgggcgaatcacttgaggccaggagttcgagaccagcctggccaacatggtgaaaccccgtctctacaaaaaaaatacaaaaaattagccgggtgtggtgatggacacctgtagtcacagctacttgggaggctgaggcaggagaattgcttgaacccgggagatggaggctgcagtgagctgaggtcaggccactgcgctccaacctgggcaacagagtaagactccatctcaaaaaaaaaaaagctggatttggagtgaaatattaataacattctccctctctctccttttgcctgtgtctccatctctgtctttttctgcatttcttcatctctgtactttccatctctgtgtgtctgttcccatctgcttctccatctatgggcatctctgggtctctcatgtctccttctgcccactttgccacatctctgcctctctcatgcccccctttctctcctgcagggtgattctggggggcctgtggtctgcaatggctccctgcagggactcgtgtcctggggagattacccttgtgcccggcccaacagaccgggtgtctacacgaacctctgcaagttcaccaagtggatccaggaaaccatccaggccaactcctgagtcatcccaggactcagcacaccggcatccccacctgctgcagggacagccctgacactcctttcagaccctcattccttcccagagatgttgagaatgttcatctctccagcccctgaccccatgtctcctggactcagggtctgcttcccccacattgggctgaccgtgtctctctagttgaaccctgggaacaatttccaaaactgtccagggcgggggttgcgtctcaatctccctggggcactttcatcctcaagctcagggcccatcccttctctgcagctctgacccaaatttagtcccagaaataaactgagaagtggaa

SEQ ID NO: 7478 - DNA, 7571 bp, Homo Sapiens
agataaccagaaccgcaaatgcaggcgggggtgtcccagagtcggctccgcctgcaccccagggcgctggggccgggcatggggcggggggtgatataagaggacggcccagcagagggatgaagattttggagcccagctgtgtgccagcccaagtcggaacttggatcacatcagatcctctcgaggtgagaagaggcttcatcaagggtgcacctgtaggggagagggtgatgctggctccaagcctgactctgctctcgagaggtaggggctgcagcctagactcccggtcctgagcagtgagggcctggaagtctgcaatttggggccttttagggaaaaacgaactacagagtcagaagtttgggttccacagggaagggcaagatcggagcctagattcctgggtctctagggatctgaagaacaggaattttgggtctgagggaggaggggctggggttctggactcctgggtctgagggaggagggcctgggggcctggactcctgggtctgagggaggaggggctgggggtctcgactcctgggtctgagggaggaggggctgggggcctggactcctgggtctgagggaggaggggctgggacctggactcctaggtctgagggaggaggagctggggcctggactcctgggtctgagggaggaggggctggggcctggactcctgggtctgagggaggaggggctggggcctggactcctgggtctgagggaggaggggctggggcctggactcctgggtctgagggaggaggggctggggcctggactcctgggtctgagggaggaggggctggggcctggactcctgggcctgagggaggagggactgagacctggactcctaggtctgagggaggagggactgggacctggactcctgggtctgagggaggaggagctgggggcctggactcctgggtctgagggaggaggggctggggcctggactcctgggtctgagggaggaggggttggggcctggactcctgagcctgagggaggagggacttggacctggactcctaggtctgagggaggaggagctgggggcctggactcctaggtctgagggaggcggggctgggggcctggactcctgggtctgagggaggaggggttggggcctggactcctgagcctgagggaggagggacttggacctggactcctaggtctgagggaggaggagctgggggcctggactcctaggtctgagggaggaggggctgggggcctggactcctgggtctgagggaggaaggtgctagggtctggactcttgggtatgagggaggaggaggttaggggtctggacttctgagtgtaaggaaggagaggccagagaaaggaatttctgggtctgagggaggaggggctggggttctggacccctaggtctgagggaggaggggctggggcctggacccctgggtctgagggaggaggggctggggcctggactcctgggtctgtggggggaggggctggggcctggacccctgggtctgagtggggaggggctgggcctgaatgctttctccttctcagctccagcaggagaggcccttcctcgcctggcagcccctgagcggctcagcagggcaccatggcaagatcccttctcctgcccctgcagatcttactgctatccttagccttggaaactgcaggagaagaaggtgaaagctggactgggaagtctgacctcacctcagggcccccactgaccctctccaaggagtccctgagtcagaacccttccctcctcaaacagcttccatcctgggaggaccagactgtcggctgaagcccccgctcttcctgcttctgctgactcagggggtctctgtcccctccaggccctgcctcctgtgctcagggtctctctgtggttccccagatgagatgcgcctcctgggtttctgagtgggctccttctgtctgtctctatccctatctcttgctttctctgtatttctccacacattttcatctgtctctgtccatctctgactctgggaatccctgaggtgcagcctcagccttcccctaatgctagctacccacgtgctcctccatgtctccatccagcccagggtgacaagattattgatggcgccccatgtgcaagaggctcccacccatggcaggtggccctgctcagtggcaatcagctccactgcggaggcgtcctggtcaatgagcgctgggtgctcactgccgcccactgcaagatgaagtaggtgccgcccaagtctctgctggaggtgcaccagcgtctccagctcgctatgggggtggaagggcagtctttctgtgcctacggctctattctcctctctctgggtctctgtcctcctctctctgggcctctgtaccccctctccctggggctctgtccccctctctccctggctctctgtctccctctctctgggtctctgtccccctctctctggatctctgttcccctctctctgtgtctctgtcccccattctctctaggtctctgttccccctcctctctctctgggtctctgtccctctctctctggtctctgtccccctctctctctggatctctgtccccctctccctgggcctctgtaccccctctccctggggctctgtccccctctctctgggtctctgtctgcctttctctctggatctctgttcccctctgtgtctctgtccccttctctctccgggtctctgttccccctcctctctttctgggtctctgtccctctctctctgggtctctgtccccctctctctctggtctctgttccccctcctctctctctggtctctgtccctctctctctgggtctctgtcaccctctctctctgggtctctgtcaccctctctctctggtctctgttccccctcctctctctgtgggtctctgtccctctctctctgggtctctgttcccctctctctctggtctctgttccccctcctctctctctggatctctgtccccctctccctggggctctgtccccctctctccctggctctctgtcttcctctctctggggctctgtccccctctctctctggtctctgttcccctctctctgggtctctgtccctctctctctgggtctctgtccctctctctctggatctctgtccccctctctctctgggtctctgttcccctctctctgggtctctgtcccctctcctctctctgtgtctctctcccccctcctctctctgtgtctctgtcccccctcctatctctgtgtctctctcccccctcctctctctgggtctctgtccccccctctctgggtctctgtctccctctctctggggctctgtccccctctctctctggatctctgttcccctctctctgggtctctgtctcccctcctctctctgtgtctctgtcccccctcctctctctgggtctctgtccccaccccgtcccccaggtctttgcacaccctctctgtcacagtgtctcttctgaatctgtgaatgtcactcctcgcagtgagtacaccgtgcacctgggcagtgatacgctgggcgacaggagagctcagaggatcaaggcctcgaagtcattccgccaccccggctactccacacagacccatgttaatgacctcatgctcgtgaagctcaatagccaggccaggctgtcatccatggtgaagaaagtcaggctgccctcccgctgcgaaccccctggaaccacctgtactgtctccggctggggcactaccacgagcccagatggtaggtggcctcagtgacccaggagtgcaggccccagccctcctccctcagacccaggagtccaggcccccagcccctcctccctcagacccaggagtccaggcctcagcccctcctccctcagacccaggagtccaggcccccagcccctcctccctcagacccgggagtccagaccccagcccctcctccctcagacccagcagtcctgggccccagaccctcctccctcggaaccaggagcctgaacaacagcccttctggtcctcgcccccatcctctctgactgacagctctccctgctcctccctgcagtgacctttccctctgacctcatgtgcgtggatgtcaagctcatctccccccaggactgcacgaaggtttacaaggacttactggaaaattccatgctgtgcgctggcatccccgactccaagaaaaacgcctgcaatgtgagaccctcccccccaattcctccccagtcctgggtaccctgtctgcatgccccagggacagagcttgacccgagtgactgggtaccaagcccggccttgccctccccccaggcctggcctcctcagctttttccacctcattctctgcctaggtcaggggtgggagtttacttaggggccaatgtggccctggggatgagacagagagtttaataggggtgagaaagtgggggtgggaccagggaaggagactgaggtgctggcctcaggcccaaaccttaagggggcaccaaaaacctcagtgattgagataaatcataatgcaatatttaaaaataaaaataaaaactcatgcagaagtccatgatggacaaaatgtcacattttaaataaagagcaggtggatcttactgaattttcccttgccgtaagtactagcgtggctcagcacagcgctgtactggcactgtcttcatttaaaatgtggataccatgcccatcatgcagttttatgtattacatttgatttcgttaagtactgcattgaagtattgtgtattgcagttactgagattttgtgcctgaagctgatgactcactcacctgaccctggccctggtcccggggaaaacactctttctctccacctcctctctgttccctctttctggccttttgtcatcccctctgtttctgaacagtcttcccacatctctctttgtgacataatttcatttcattcttttcctctttgttttttctctgtgttgagctagcttgctctccctcccttgttctctctccatgccctcctctctgctctctgtcttctccctctttctcttgcttctctctctctcctcccctccctctctcctctccctgcccccctgctctctcttttttcctctctctctgtctcctctctggccctctcctctttctctctctcccccacttctctgtctctcttcatctctctccctcatctctccttgccccctcctttttactgtctctctctttctctttcttctatctctctcctctccctgccgctcccccatctctgtctttctttctctctctttattctcctcctctcttccagtctctctctcctctccccacccccaccccatctctctccccacaccttccccccctttctctttgtctctctcttctccctctttcttctccacccccatctctctctctcttctcttcccacaccctccccatctccctcatctctttgtctgtctctcttctccctccttcttttccacccccatctctctgtctctctctctccccataccctttccctcttcctcatctctctttgtctctctctcctttccctctttcttctccacctccaactctctctgtctctccacacccatcctccttgctcacatctgcaccttcagctgtcaggggatgtgggatggtgagtgttagggatagaggagatgggagagagatgactgtcctagagaatagggtgttccccttctcccctggtgagggccagtttcatgaatgtgcaagctctgcacggacacagagccccacactcagaagggtctcaaacttagtctaatgcattcctgctgttgtcttgaaattctcaataatttttgaacaaagggccctgcattttcgttttgcaccaagtcctgtaaattatgtaactggtcttcaccctggtctccgagaccatcgtgtccccctttcctgcgccacagggcacgcatccaccccttggagatgatgttccttctcccactagcttggagcagggtccttaacattggaaaataaagagtgctctgatcctggaagccccaccccttctctgcaattggtctcattggccaagggtcaaaccagtgtcttcaaaggacctagtgtgtccctagcactagctctcccattagtccccagagacaatgagtctcttctcattggctatggtggaagtccataatctgcaagacaaagaccgataactgaggaatgtatgagaatgagttgggctttgatctgaagccaaagttaatctccggctctattccctctagggtgactcagggggaccgttggtgtgcagaggtaccctgcaaggtctggtgtcctggggaactttcccttgcggccaacccaatgacccaggagtctacactcaagtgtgcaagttcaccaagtggataaatgacaccatgaaaaagcatcgctaacgccacactgagttaattaactgtgtgcttccaacagaaaatgcacaggagtgaggacgccgatgacctatgaagtcaaatttgactttacctttcctcaaagatatatttaaaccaacctcatgccctgttgataaaccaatcaaattggtaaagacctaaaaccaaaacaaataaagaaacacaaaaccctcagtgctggagaagagtcagtgagaccagcactctcaaacactggaactggacgttcgtacagtctttacggaagacacttggtcaacgtacaccgagacccttattcaccacctttgacccagtaactctaatcttaggaagaacctactgaaacaaaaaaaatccaaaatgtagaacaagacttgaatttaccatgatattatttatcacagaaatgaagtgaaaccatcaaacatgttccaaaagtaccagatggcttaaataatagtctggcttggcacaacgatgttttttttctttgagacagagtctctgttgcttgggctgcaatgcagtgatgcaatcttggctcactgcaacctccgcctcctgggttcaagtgattctcgtgcttcagcctcccaagtacctgggactacaggtgtgcaccaccacaccaggctaattttttgtgtatttttactagagacagggtttcaccatgttggccagcatggtcttgaacgcctgacctcagatgatccacccaccttggcctcccaaagtgctgggattacaggcatgagccaccacggccagcccacaatgatattacaaacctattaaaaatgatacttagacagaattgtcagtattattcaagaacatttaggctataggatgttaaatgacaaaaggaaggacaaaaatatatatgtatgtgaccctacccataaaaaatgaaatattcacagaatcagatctgaaaacacatgtcccagactgcatactggggtcgtcatgaggtgtctccttccttctgtgtacttttccttgaatgtgcacttttataacatgaaaaataaaggtggggaaaaaagtctgaagatctaa

SEQ ID NO: 7479 - DNA, 17 bp, Artificial Sequence
  Synthetic
acattgcaggcgttttt

SEQ ID NO: 7480 - DNA, 17 bp, Artificial Sequence
  Synthetic
cacattgcaggcgtttt

SEQ ID NO: 7481 - DNA, 17 bp, Artificial Sequence
  Synthetic
tcacattgcaggcgttt

SEQ ID NO: 7482 - DNA, 17 bp, Artificial Sequence
  Synthetic
ctcacattgcaggcgtt

SEQ ID NO: 7483 - DNA, 17 bp, Artificial Sequence
  Synthetic
tctcacattgcaggcgt

SEQ ID NO: 7484 - DNA, 17 bp, Artificial Sequence
  Synthetic
gtctcacattgcaggcg

SEQ ID NO: 7485 - DNA, 17 bp, Artificial Sequence
  Synthetic
ggtctcacattgcaggc

SEQ ID NO: 7486 - DNA, 17 bp, Artificial Sequence
  Synthetic
gggtctcacattgcagg

SEQ ID NO: 7487 - DNA, 17 bp, Artificial Sequence
  Synthetic
agggtctcacattgcag

SEQ ID NO: 7488 - DNA, 17 bp, Artificial Sequence
  Synthetic
gagggtctcacattgca

SEQ ID NO: 7489 - DNA, 17 bp, Artificial Sequence
  Synthetic
ggagggtctcacattgc

SEQ ID NO: 7490 - DNA, 17 bp, Artificial Sequence
  Synthetic
gggagggtctcacattg

SEQ ID NO: 7491 - DNA, 17 bp, Artificial Sequence
  Synthetic
ggggagggtctcacatt

SEQ ID NO: 7492 - DNA, 17 bp, Artificial Sequence
  Synthetic
gggggagggtctcacat

SEQ ID NO: 7493 - DNA, 17 bp, Artificial Sequence
  Synthetic
ggggggagggtctcaca

SEQ ID NO: 7494 - DNA, 17 bp, Artificial Sequence
  Synthetic
gggggggagggtctcac

SEQ ID NO: 7495 - DNA, 17 bp, Artificial Sequence
  Synthetic
tgggggggagggtctca

SEQ ID NO: 7496 - DNA, 17 bp, Artificial Sequence
  Synthetic
ttgggggggagggtctc

SEQ ID NO: 7497 - DNA, 17 bp, Artificial Sequence
  Synthetic
attgggggggagggtct

SEQ ID NO: 7498 - DNA, 17 bp, Artificial Sequence
  Synthetic
aattgggggggagggtc

SEQ ID NO: 7499 - DNA, 17 bp, Artificial Sequence
  Synthetic
gaattgggggggagggt

SEQ ID NO: 7500 - DNA, 17 bp, Artificial Sequence
  Synthetic
ggaattgggggggaggg

SEQ ID NO: 7501 - DNA, 17 bp, Artificial Sequence
  Synthetic
aggaattgggggggagg

SEQ ID NO: 7502 - DNA, 17 bp, Artificial Sequence
  Synthetic
gaggaattgggggggag

SEQ ID NO: 7503 - DNA, 17 bp, Artificial Sequence
  Synthetic
ggaggaattggggggga

SEQ ID NO: 7504 - DNA, 17 bp, Artificial Sequence
  Synthetic
gggaggaattggggggg

SEQ ID NO: 7505 - DNA, 17 bp, Artificial Sequence
  Synthetic
ggggaggaattgggggg

SEQ ID NO: 7506 - DNA, 17 bp, Artificial Sequence
  Synthetic
tggggaggaattggggg

SEQ ID NO: 7507 - DNA, 17 bp, Artificial Sequence
  Synthetic
ctggggaggaattgggg

SEQ ID NO: 7508 - DNA, 17 bp, Artificial Sequence
  Synthetic
actggggaggaattggg

SEQ ID NO: 7509 - DNA, 17 bp, Artificial Sequence
  Synthetic
gactggggaggaattgg

SEQ ID NO: 7510 - DNA, 17 bp, Artificial Sequence
  Synthetic
ggactggggaggaattg

SEQ ID NO: 7511 - DNA, 17 bp, Artificial Sequence
  Synthetic
aggactggggaggaatt

SEQ ID NO: 7512 - DNA, 17 bp, Artificial Sequence
  Synthetic
caggactggggaggaat

SEQ ID NO: 7513 - DNA, 17 bp, Artificial Sequence
  Synthetic
ccaggactggggaggaa

SEQ ID NO: 7514 - DNA, 17 bp, Artificial Sequence
  Synthetic
cccaggactggggagga

SEQ ID NO: 7515 - DNA, 17 bp, Artificial Sequence
  Synthetic
acccaggactggggagg

SEQ ID NO: 7516 - DNA, 17 bp, Artificial Sequence
  Synthetic
tacccaggactggggag

SEQ ID NO: 7517 - DNA, 17 bp, Artificial Sequence
  Synthetic
gtacccaggactgggga

SEQ ID NO: 7518 - DNA, 17 bp, Artificial Sequence
  Synthetic
ggtacccaggactgggg

SEQ ID NO: 7519 - DNA, 17 bp, Artificial Sequence
  Synthetic
gggtacccaggactggg

SEQ ID NO: 7520 - DNA, 17 bp, Artificial Sequence
  Synthetic
agggtacccaggactgg

SEQ ID NO: 7521 - DNA, 17 bp, Artificial Sequence
  Synthetic
cagggtacccaggactg

SEQ ID NO: 7522 - DNA, 17 bp, Artificial Sequence
  Synthetic
acagggtacccaggact

SEQ ID NO: 7523 - DNA, 17 bp, Artificial Sequence
  Synthetic
gacagggtacccaggac

SEQ ID NO: 7524 - DNA, 17 bp, Artificial Sequence
  Synthetic
agacagggtacccagga

SEQ ID NO: 7525 - DNA, 17 bp, Artificial Sequence
  Synthetic
cagacagggtacccagg

SEQ ID NO: 7526 - DNA, 17 bp, Artificial Sequence
  Synthetic
gcagacagggtacccag

SEQ ID NO: 7527 - DNA, 17 bp, Artificial Sequence
  Synthetic
tgcagacagggtaccca

SEQ ID NO: 7528 - DNA, 17 bp, Artificial Sequence
  Synthetic
atgcagacagggtaccc

SEQ ID NO: 7529 - DNA, 17 bp, Artificial Sequence
  Synthetic
catgcagacagggtacc

SEQ ID NO: 7530 - DNA, 17 bp, Artificial Sequence
  Synthetic
gcatgcagacagggtac

SEQ ID NO: 7531 - DNA, 17 bp, Artificial Sequence
  Synthetic
ggcatgcagacagggta

SEQ ID NO: 7532 - DNA, 17 bp, Artificial Sequence
  Synthetic
gggcatgcagacagggt

SEQ ID NO: 7533 - DNA, 17 bp, Artificial Sequence
  Synthetic
ggggcatgcagacaggg

SEQ ID NO: 7534 - DNA, 17 bp, Artificial Sequence
  Synthetic
tggggcatgcagacagg

SEQ ID NO: 7535 - DNA, 17 bp, Artificial Sequence
  Synthetic
ctggggcatgcagacag

SEQ ID NO: 7536 - DNA, 17 bp, Artificial Sequence
  Synthetic
cctggggcatgcagaca

SEQ ID NO: 7537 - DNA, 17 bp, Artificial Sequence
  Synthetic
ccctggggcatgcagac

SEQ ID NO: 7538 - DNA, 17 bp, Artificial Sequence
  Synthetic
tccctggggcatgcaga

SEQ ID NO: 7539 - DNA, 17 bp, Artificial Sequence
  Synthetic
gtccctggggcatgcag

SEQ ID NO: 7540 - DNA, 17 bp, Artificial Sequence
  Synthetic
tgtccctggggcatgca

SEQ ID NO: 7541 - DNA, 17 bp, Artificial Sequence
  Synthetic
ctgtccctggggcatgc

SEQ ID NO: 7542 - DNA, 17 bp, Artificial Sequence
  Synthetic
tctgtccctggggcatg

SEQ ID NO: 7543 - DNA, 17 bp, Artificial Sequence
  Synthetic
ctctgtccctggggcat

SEQ ID NO: 7544 - DNA, 17 bp, Artificial Sequence
  Synthetic
gctctgtccctggggca

SEQ ID NO: 7545 - DNA, 17 bp, Artificial Sequence
  Synthetic
agctctgtccctggggc

SEQ ID NO: 7546 - DNA, 17 bp, Artificial Sequence
  Synthetic
aagctctgtccctgggg

SEQ ID NO: 7547 - DNA, 17 bp, Artificial Sequence
  Synthetic
caagctctgtccctggg

SEQ ID NO: 7548 - DNA, 17 bp, Artificial Sequence
  Synthetic
tcaagctctgtccctgg

SEQ ID NO: 7549 - DNA, 17 bp, Artificial Sequence
  Synthetic
gtcaagctctgtccctg

SEQ ID NO: 7550 - DNA, 17 bp, Artificial Sequence
  Synthetic
ggtcaagctctgtccct

SEQ ID NO: 7551 - DNA, 17 bp, Artificial Sequence
  Synthetic
gggtcaagctctgtccc

SEQ ID NO: 7552 - DNA, 17 bp, Artificial Sequence
  Synthetic
cgggtcaagctctgtcc

SEQ ID NO: 7553 - DNA, 17 bp, Artificial Sequence
  Synthetic
tcgggtcaagctctgtc

SEQ ID NO: 7554 - DNA, 17 bp, Artificial Sequence
  Synthetic
ctcgggtcaagctctgt

SEQ ID NO: 7555 - DNA, 17 bp, Artificial Sequence
  Synthetic
actcgggtcaagctctg

SEQ ID NO: 7556 - DNA, 17 bp, Artificial Sequence
  Synthetic
cactcgggtcaagctct

SEQ ID NO: 7557 - DNA, 17 bp, Artificial Sequence
  Synthetic
tcactcgggtcaagctc

SEQ ID NO: 7558 - DNA, 17 bp, Artificial Sequence
  Synthetic
gtcactcgggtcaagct

SEQ ID NO: 7559 - DNA, 17 bp, Artificial Sequence
  Synthetic
agtcactcgggtcaagc

SEQ ID NO: 7560 - DNA, 17 bp, Artificial Sequence
  Synthetic
cagtcactcgggtcaag

SEQ ID NO: 7561 - DNA, 17 bp, Artificial Sequence
  Synthetic
ccagtcactcgggtcaa

SEQ ID NO: 7562 - DNA, 17 bp, Artificial Sequence
  Synthetic
cccagtcactcgggtca

SEQ ID NO: 7563 - DNA, 17 bp, Artificial Sequence
  Synthetic
acccagtcactcgggtc

SEQ ID NO: 7564 - DNA, 17 bp, Artificial Sequence
  Synthetic
tacccagtcactcgggt

SEQ ID NO: 7565 - DNA, 17 bp, Artificial Sequence
  Synthetic
gtacccagtcactcggg

SEQ ID NO: 7566 - DNA, 17 bp, Artificial Sequence
  Synthetic
ggtacccagtcactcgg

SEQ ID NO: 7567 - DNA, 17 bp, Artificial Sequence
  Synthetic
tggtacccagtcactcg

SEQ ID NO: 7568 - DNA, 17 bp, Artificial Sequence
  Synthetic
ttggtacccagtcactc

SEQ ID NO: 7569 - DNA, 17 bp, Artificial Sequence
  Synthetic
cttggtacccagtcact

SEQ ID NO: 7570 - DNA, 17 bp, Artificial Sequence
  Synthetic
gcttggtacccagtcac

SEQ ID NO: 7571 - DNA, 17 bp, Artificial Sequence
  Synthetic
ggcttggtacccagtca

SEQ ID NO: 7572 - DNA, 17 bp, Artificial Sequence
  Synthetic
gggcttggtacccagtc

SEQ ID NO: 7573 - DNA, 17 bp, Artificial Sequence
  Synthetic
cgggcttggtacccagt

SEQ ID NO: 7574 - DNA, 17 bp, Artificial Sequence
  Synthetic
ccgggcttggtacccag

SEQ ID NO: 7575 - DNA, 1513 bp, Homo Sapiens
aggaggaggcagtggccaggaaggcacaggcctgagaagtctgcggctgagctgggagcaaatcccccaccccctacctgggggacagggcaagtgagacctggtgagggtggctcagcaggcagggaaggagaggtgtctgtgcgtcctgcacccacatctttctctgtcccctccttgccctgtctggaggctgctagactcctatcttctgaattctatagtgcctgggtctcagcgcagtgccgatggtggcccgtccttgtggttcctctctacctggggaaataaggtgcagcggccatggctacagcaagacccccctggatgtgggtgctctgtgctctgatcacagccttgcttctgggggtcacagagcatgttctcgccaacaatgatgtttcctgtgaccacccctctaacaccgtgccctctgggagcaaccaggacctgggagctggggccggggaagacgcccggtcggatgacagcagcagccgcatcatcaatggatccgactgcgatatgcacacccagccgtggcaggccgcgctgttgctaaggcccaaccagctctactgcggggcggtgttggtgcatccacagtggctgctcacggccgcccactgcaggaagaaagttttcagagtccgtctcggccactactccctgtcaccagtttatgaatctgggcagcagatgttccagggggtcaaatccatcccccaccctggctactcccaccctggccactctaacgacctcatgctcatcaaactgaacagaagaattcgtcccactaaagatgtcagacccatcaacgtctcctctcattgtccctctgctgggacaaagtgcttggtgtctggctgggggacaaccaagagcccccaagtgcacttccctaaggtcctccagtgcttgaatatcagcgtgctaagtcagaaaaggtgcgaggatgcttacccgagacagatagatgacaccatgttctgcgccggtgacaaagcaggtagagactcctgccagggtgattctggggggcctgtggtctgcaatggctccctgcagggactcgtgtcctggggagattacccttgtgcccggcccaacagaccgggtgtctacacgaacctctgcaagttcaccaagtggatccaggaaaccatccaggccaactcctgagtcatcccaggactcagcacaccggcatccccacctgctgcagggacagccctgacactcctttcagaccctcattccttcccagagatgttgagaatgttcatctctccagcccctgaccccatgtctcctggactcagggtctgcttcccccacattgggctgaccgtgtctctctagttgaaccctgggaacaatttccaaaactgtccagggcgggggttgcgtctcaatctccctggggcactttcatcctcaagctcagggcccatcccttctctgcagctctgacccaaatttagtcccagaaataaactgagaagtggaa

SEQ ID NO: 7576 - DNA, 1955 bp, Homo Sapiens
gaagattttggagcccagctgtgtgccagcccaagtcggaacttggatcacatcagatcctctcgagctccagcaggagaggcccttcctcgcctggcagcccctgagcggctcagcagggcaccatggcaagatcccttctcctgcccctgcagatcttactgctatccttagccttggaaactgcaggagaagaagcccagggtgacaagattattgatggcgccccatgtgcaagaggctcccacccatggcaggtggccctgctcagtggcaatcagctccactgcggaggcgtcctggtcaatgagcgctgggtgctcactgccgcccactgcaagatgaatgagtacaccgtgcacctgggcagtgatacgctgggcgacaggagagctcagaggatcaaggcctcgaagtcattccgccaccccggctactccacacagacccatgttaatgacctcatgctcgtgaagctcaatagccaggccaggctgtcatccatggtgaagaaagtcaggctgccctcccgctgcgaaccccctggaaccacctgtactgtctccggctggggcactaccacgagcccagatgtgacctttccctctgacctcatgtgcgtggatgtcaagctcatctccccccaggactgcacgaaggtttacaaggacttactggaaaattccatgctgtgcgctggcatccccgactccaagaaaaacgcctgcaatggtgactcagggggaccgttggtgtgcagaggtaccctgcaaggtctggtgtcctggggaactttcccttgcggccaacccaatgacccaggagtctacactcaagtgtgcaagttcaccaagtggataaatgacaccatgaaaaagcatcgctaacgccacactgagttaattaactgtgtgcttccaacagaaaatgcacaggagtgaggacgccgatgacctatgaagtcaaatttgactttacctttcctcaaagatatatttaaaccaacctcatgccctgttgataaaccaatcaaattggtaaagacctaaaaccaaaacaaataaagaaacacaaaaccctcagtgctggagaagagtcagtgagaccagcactctcaaacactggaactggacgttcgtacagtctttacggaagacacttggtcaacgtacaccgagacccttattcaccacctttgacccagtaactctaatcttaggaagaacctactgaaacaaaaaaaatccaaaatgtagaacaagacttgaatttaccatgatattatttatcacagaaatgaagtgaaaccatcaaacatgttccaaaagtaccagatggcttaaataatagtctggcttggcacaacgatgttttttttctttgagacagagtctctgttgcttgggctgcaatgcagtgatgcaatcttggctcactgcaacctccgcctcctgggttcaagtgattctcgtgcttcagcctcccaagtacctgggactacaggtgtgcaccaccacaccaggctaattttttgtgtatttttactagagacagggtttcaccatgttggccagcatggtcttgaacgcctgacctcagatgatccacccaccttggcctcccaaagtgctgggattacaggcatgagccaccacggccagcccacaatgatattacaaacctattaaaaatgatacttagacagaattgtcagtattattcaagaacatttaggctataggatgttaaatgacaaaaggaaggacaaaaatatatatgtatgtgaccctacccataaaaaatgaaatattcacagaatcagatctgaaaacacatgtcccagactgcatactggggtcgtcatgaggtgtctccttccttctgtgtacttttccttgaatgtgcacttttataacatgaaaaataaaggtggggaaaaaagtctgaagatctaa

SEQ ID NO: 7577 - DNA, 9740 bp, Homo Sapiens
aggaggaggcagtggccaggaaggcacaggcctgagaagtctgcggctgagctgggagcaaatcccccaccccctacctgggggacagggcaagtgagacctggtgagggtggctcagcaggcagggaaggagaggtgtctgtgcgtcctgcacccacatctttctctgtcccctccttgccctgtctggaggctgctagactcctatcttctgaattctatagtgcctgggtctcagcgcagtgccgatggtggcccgtccttgtggttcctctctacctggggaaataaggtaggggagggaggggaagtgggttaagggctccccggatcgcctgggcctcccaaccctctgacattccccatccaggtgcagcggccatggctacagcaagacccccctggatgtgggtgctctgtgctctgatcacagccttgcttctgggggtcacaggtaaccagaactctggggtgggagggttgtgggattgggaggactgtctctgcggcactagagcgcctgtcccctggggaactgtgtgagcctgggcatgactccgggaccgggtgaatgtgagtctctgtctgtacttgtggttgtgcgatcgtatgtggccctgtgactgccacggtgtgtgtcggggagggggatgccttttcccatatcaggtgactgtgcggcaggtggcactgaccctttgaggctgtgtgtgtggttttgtgattgtgtgtgcatttaagattgtgtgtggctccacagctgtgtgggtgaatgcatgtagcactgggggtgttcactgtgtgtttggctgtgtgtggtgacttggcattgtatatgactgcaggtatctgcagttcctgtccctgaggtcccgggattgcgtgcaacaaaagtggtcatcaccatggaaagctgtgactgtgtgctgcttgcaggcgattatgtgattgtggctgagtgtgacgttatggatgcccgtatttgtgaccgtgtgactacctgaagctctgtgtaggggtgactgtatgtgactgtgtgtgtctgtgtgaggccgtgtaaatgctactgtatgtgtgatggtgcagctgtgtgtctggagtttctgtctctgcctggagggatagagggtgcaggggtagctatctctgggagatgggtgccaggtgactgacttgcagtgtgtgcctgtgtgcagaagagtatgtggcagtctgaacatctgtgcacacacggcatctgtgcgtggcactgagacactgtggatgagggtgtgcgatcccgctaggctgcccgggagcgtgtgtacctggagacagagctgtatgttagctgcacctgtggaggcaacatgggcgtgtctgcagaactgcgtgcgtgcttggctgttactgctgttgtgcgcgtggttcttggggtgagttcgtgaatgatggtggtgccagggccatcagcaagggtaagaaccaggccgggcgcggtggctcacgcctgtaatcccagccctttgggaggccgaggcaggcggatcacctgaggtcgggagatcgaggccagcctgaccaacatggagaaccccgtctctactaaaaatacaaaaaattagctggtgtggtggcgcgtgcctgtaatcccagctactcgggagactggggcagaaaaatcgcttgaacccgggaggtggaggttgcggtgagccgagatcgcgccattgcactccagcctgggcaacaagagcgaaactccgtctcgaaagaaaaaaagaaaaaaaaaagggtaagaaccagtgaatgggcacgggaggactgatgatggagtggggcatgcatgtagtctgtaggtctgtgtgtgagaggaggagattgacaggattgagaaggcatgttttcatctgagaattcagaaacctaggcctgctcttcccctccatgtggccccctaagctgagcccttctttcctggtcctgctttcggaaccctagctccgcccatgagctctgaccccacctcctttcctcaaccacgcccctaggccagactctagtggaccccgcctaaggccacacccctttgggccaggctccaccccctattctgtgggtaccttctagaacccccttcaaagtcagagcttttttttttttttttttggagacagtcttgctctctctcccaggctggagtgcagtggcgtgatctcggctcactgcaacctctgcctcccaggttcaagtgattctcgtgcctccacctcctgagtagctgggattacaggtgcgcgccaccacgcctggctaatttttgtgtctttagtagagacagggtttcaccttgttggccaggctggtctcaaactcccaacctcaggtgatccgcccacctcggcctcccagagtgctggggttacaggcgtgagccaccgcccccagcccaaagtcagagctctttataggagactctaacatgtaaccctgaccctggccctaactaagtcaattccaaaccccttcctgcctccagccctgaccccactcactgaggcctgaccccacttcttgagaccagttccatccctaaagccctggtctccctcccatccccaggctccagcccccacagctttggcactacccctgagcttgtccaggaatcctgtacccaattttaccctcacatgtagttctagccaattccaggaatctgtgaggtccagttagagtccagtaaccctacctgagcctgggctctgtccttgagcttgagcctgggcttgagaggtgccactcttattctccaggccctgcccctgccccctcagcatgtcagacacccaccctctagctggtctggcctcttgagtctgaaacccacccccagcccaagccccgcctctgagccccgcccaacccattttccgttcccagagcatgttctcgccaacaatgatgtttcctgtgaccacccctctaacaccgtgccctctgggagcaaccaggacctgggagctggggccggggaagacgcccggtcggatgacagcagcagccgcatcatcaatggatccgactgcgatatgcacacccagccgtggcaggccgcgctgttgctaaggcccaaccagctctactgcggggcggtgttggtgcatccacagtggctgctcacggccgcccactgcaggaagaagtgagtgggagttccaagaggagggttggtggggacggggaagtgggggtgggggtggggaagtgggggtgggggtgtcatggaggtgagggctggtggggacggggaagtggggttgggggtgtcatggaaggtgagggttggtggggatgggttggggatgtgggagcaggaggaggtcgagttggggataggactaaggatggagttttgcgggggagcaaggtgggaggatgaggttggagaggggagagtgttgtggtagggaatgggaaggagccaaggatgggttggatttggggttaggagcatatatttgttgaatggtttgggatggaggtggaattgggattggctttagaattgggggtgggtgaaaatcgggctggggtggaaatgaagatagcatggagatagggttgagattgggagcagatatagaatgaaggatggggattggagttttgggtggggttggagatggttggatttgggcttgagaatgcatatggtgatggcttctgggtagggaaagaattagggttgggaatgggatgggtttggaattgtgactgggatggggacaggcatgggattggagaccaagagggagttgaggatggtttggggaccgggggtggggatgggggtggggctggggctgggtgtggggttgggattggcgttggacgtggagatagagatcagggttggtggtgacctgccccatcttcctcagagttttcagagtccgtctcggccactactccctgtcaccagtttatgaatctgggcagcagatgttccagggggtcaaatccatcccccaccctggctactcccaccctggccactctaacgacctcatgctcatcaaactgaacagaagaattcgtcccactaaagatgtcagacccatcaacgtctcctctcattgtccctctgctgggacaaagtgcttggtgtctggctgggggacaaccaagagcccccaaggtgagtgtccaggttcttcttgataccgacccatctctgccgccttccatctttctccacttctcattgtgttcctgtttgacagtgcacttccctaaggtcctccagtgcttgaatatcagcgtgctaagtcagaaaaggtgcgaggatgcttacccgagacagatagatgacaccatgttctgcgccggtgacaaagcaggtagagactcctgccaggtgaggacacctctctttattcagcagatacacactgagtgccaactcggtaacatggagcgttgccaaattctgagaatccagcaattgccaagacagtcaggacccctgttctcacagagctcataccctagagtagtggtgtttagtagaaataatgctgagctgcttatgtcatttccagttttttagtagccacattaaaacaggtaaaaaaggctgggcgcagtggctcacacctgtaatcccagcactttgggaggctgaggcaggcagatcacctttggtcaggagtttgagactagcctggccaacatggcgaaactctgtctctaaaaaaaaatacaaaaattagcctggcatggtggcgggcgcctgtaatctcagctgctcaggaggccgagacacaagaatcacttaaacccaggaggtggaggttgcagtgagctgagatcgtgccactcactccaacctgggagacagagtgacacttttgtctcaaaaagaaaaaaaaaaacaagtaaaaaagaaacaggtgaagttaactttaataacccaatgtatcccaaatacaatcatttcaaagtgtaattaatataaaacaattatgaatgagatactttacattcttttcttgttttcatattaagtctttgaaagtgagtatatatgttatgctgacagcacatctcaatttggactagctacatttcaggtgctcagtagccacatgtggctagcagttactgtattggatggcacggatctagagggaaagatcagggctgttttgtatggttgggcaggttgtgcactgcataaagataccatatctaataggggcactccgtgttacagatgtcagttttggcagttttcaggcgtgtggtagttaagtgtcttgtttcaacaaaatctgtaatatgacagttttctagcaagtgctggtaaaatatcttgaggaaggaaaagagaaatctggtaggtatttttacaagagaatatttaatacaggggattaattgcaaagctgctggaagggctggaggaacaaagttaaaaaataaaaaactctgtggtcaagaatctgcataaatagggcaatttcagagagtggtaaaggttaaccccaaaataaaacatggttttaggatagtaaacaataagggccaatattcaaaaaggtggtcaggggagcctccttggagaggtggcatttgagcagagaatggatgacacaaagaagctaaactcgtgaagtttaaggggaaagaaaaggcacgtgcaaaggccctgaggcagtaaggaatttggctgattcaaagaagaagaggaaaccaatgcaactggagaacaaaagtgggggcaacagtagaaagtgacgctggaggtgtaggcaggggcgaatgctctgcaagtatttcttggtcaccaacacagagcttccctatgttctaatggaagctgtatctgttgaggaagacagaatttaaaatcaaactgttacatcaaccagcacccttctctgtattcaggctcccaagggatctagaaggacgtaagttaacaagctctcattagcagggtgtgtgtttcaacagtagttaggaagctggggattcaggagtactccagtcccatggctatgaaaagctccccccaaattgtacaaacctgacaaatgcaacacctccccagctctccccatttcttctctgtgccctgggtgtgggggggtgggttgcgagggggaaaacttttaacagaagaaagcacatctcggccgggcgtggtggctcacacctgtaatcccaacactttgggaggccgaggcgggtggatcactaggtcaggagatggagaccatcctggctgacacggtgaaaccctgtctctactaaaaacacaaaaaattagccgggcgtggtggcaggcgcctgtagtcccagctactcgggaggctgaggcaggagaatggcctgaacccgggaggcggaacttgcagtgagccgaggttgcaccactgcactccagcctgggcaacacagtgagactccgtctcaaaaaaaaaaaaagaaaagaaaagaaatcacatctcattcaagtggtggcatttaaaactatttagcctttctgtaggcaaggttagtatcttgtttttccagacctcaaggtgtttttttgtttgttttttcataccggtgtgtggtctgggtgtggccactaaaagctacaagcaagaaataataacaactacaacaatactaataccaatagtataaaaataatagcatctggctaattgctggacactgttttaagtggtttgcatgcctcagctcattaactcatttacctgttattattggccctattttacaaacaaggagccaaggctcagagcagttaactaacagcctctcaaaagaaactctgcagagatattaaatttaaaaaataatgagagaaattaaaccacaagaaagttgaaatttagaggtacaggcagctaagcttgtttgctttgaaacagtgtctgctactgggaaaaaggcaagtcttggctttcctaataattgataccaggactctgtaattcatattttgcatgcatgtaagtaagaaatgaagccgggtgcaatggcacatgccagtaatcccagcactctgggagactgaagtgggaagatcacttgagctcaggagttcaagaccagcctgggcaactaaaaattaaaaaaataaaaatactaattgtttttattttagtagattttattcataccacttacatcattattgtagtatgtacatatttatttcttttcttttcttttcttttcttttttgagacggagtctcgctctgtcacccaggctggagtgcaatggcaccatatcagctcactgcagcatgcgcctcctgggttcaagcatttcttccacctcagcctcccaagtagctgggataacaggcacccaccaccatgcctggctatttttttttttccgtagagatggggttccaccatgttggccaggctggtcttgaactcctgacctccagtgatctgcctgcctcggcctcccaaattgctggtattacaggtgtgagccaccgtgcccaggtgggagatagacatttctctctacctcaaacagaggtccactcaagctacttttcattttcttcataaatattagccgagtggctattttgcaccaggaatggttccaggtgctgtggatatggcatcaggcaaaacagaccaaaaacttcctgccgcgtggacctcatgttccccaagtggaagacaggcaataaagagatagataaatatgtagtaaattaaaaaaaaaaaaaattagccgggtgtggtggcttgcacctgtagttccagctacttgggaggctgaggtgggagaattgcttgagcccaaacgtttgaggctgcggtaagccatgactgcactgctgcactccagacagcagcctgggtgacaaagcaagacgtttttgtcagaaagaaaaaaaaaagagacgaagggaggaaggagagagaaaggaaggaaggaaggagaaagaaaggaaggaaggagaaagaaaggaaggaaggaaggagaaagaaaggaagaaagagaaagaaagaaaaagaaagaaagaaagaagaaagaaaagagagaggaaggaaggaaagaaggaaaagagggaaaaaaatgactgttgaagagcagtgagtattattataggagggtaattatagggaggtatggggaattgaagacaggaaacacaaattagtccaagcgaatggatttctattgggagtgattctgcccctagaagacactggcaataccaggagacatttttggttgtcacaactatatggaggggcattactggcaactaatggatagatgccaagtgtgctgttcaacatgctatgatgcacacggcaggcctccacaacaaaccattatccagcttcagatgcccacagtgcccagatcgaggaaccctcatccaggggctgagaaccgtatttttgcagaagggaggtataaggatgggttggtggagaatggggaaggaaggtgtgtgtccagtaagagaaataaggcctgcacaggctggaggggagagtgagagagaaagggaggcggagagatacacgatgagggagacaggctggaacagaaagtagagacgaagattcgagatgtggagaggaagggtcacagacccccccgaaatgatgtgtggacaacaggaatctggaagaggaagatggagtggagagtgacaaatggggtctaaaggttgaacttggaggccaggcatggtggctcacgcctgtaatcccaacactttggaggctgaggtgggcgaatcacttgaggccaggagttcgagaccagcctggccaacatggtgaaaccccgtctctacaaaaaaaatacaaaaaattagccgggtgtggtgatggacacctgtagtcacagctacttgggaggctgaggcaggagaattgcttgaacccgggagatggaggctgcagtgagctgaggtcaggccactgcgctccaacctgggcaacagagtaagactccatctcaaaaaaaaaaaagctggatttggagtgaaatattaataacattctccctctctctccttttgcctgtgtctccatctctgtctttttctgcatttcttcatctctgtactttccatctctgtgtgtctgttcccatctgcttctccatctatgggcatctctgggtctctcatgtctccttctgcccactttgccacatctctgcctctctcatgcccccctttctctcctgcagggtgattctggggggcctgtggtctgcaatggctccctgcagggactcgtgtcctggggagattacccttgtgcccggcccaacagaccgggtgtctacacgaacctctgcaagttcaccaagtggatccaggaaaccatccaggccaactcctgagtcatcccaggactcagcacaccggcatccccacctgctgcagggacagccctgacactcctttcagaccctcattccttcccagagatgttgagaatgttcatctctccagcccctgaccccatgtctcctggactcagggtctgcttcccccacattgggctgaccgtgtctctctagttgaaccctgggaacaatttccaaaactgtccagggcgggggttgcgtctcaatctccctggggcactttcatcctcaagctcagggcccatcccttctctgcagctctgacccaaatttagtcccagaaataaactgagaagtggaatctt

SEQ ID NO: 7578 - DNA, 7597 bp, Homo Sapiens
aattgctctcgctgcgtcagggttccagataaccagaaccgcaaatgcaggcgggggtgtcccagagtcggctccgcctgcaccccagggcgctggggccgggcatggggcggggggtgatataagaggacggcccagcagagggatgaagattttggagcccagctgtgtgccagcccaagtcggaacttggatcacatcagatcctctcgaggtgagaagaggcttcatcaagggtgcacctgtaggggagagggtgatgctggctccaagcctgactctgctctcgagaggtaggggctgcagcctagactcccggtcctgagcagtgagggcctggaagtctgcaatttggggccttttagggaaaaacgaactacagagtcagaagtttgggttccacagggaagggcaagatcggagcctagattcctgggtctctagggatctgaagaacaggaattttgggtctgagggaggaggggctggggttctggactcctgggtctgagggaggagggcctgggggcctggactcctgggtctgagggaggaggggctgggggtctcgactcctgggtctgagggaggaggggctgggggcctggactcctgggtctgagggaggaggggctgggacctggactcctaggtctgagggaggaggagctggggcctggactcctgggtctgagggaggaggggctggggcctggactcctgggtctgagggaggaggggctggggcctggactcctgggtctgagggaggaggggctggggcctggactcctgggtctgagggaggaggggctggggcctggactcctgggtctgagggaggaggggctggggcctggactcctgggcctgagggaggagggactgagacctggactcctaggtctgagggaggagggactgggacctggactcctgggtctgagggaggaggagctgggggcctggactcctgggtctgagggaggaggggctggggcctggactcctgggtctgagggaggaggggttggggcctggactcctgagcctgagggaggagggacttggacctggactcctaggtctgagggaggaggagctgggggcctggactcctaggtctgagggaggcggggctgggggcctggactcctgggtctgagggaggaggggttggggcctggactcctgagcctgagggaggagggacttggacctggactcctaggtctgagggaggaggagctgggggcctggactcctaggtctgagggaggaggggctgggggcctggactcctgggtctgagggaggaaggtgctagggtctggactcttgggtatgagggaggaggaggttaggggtctggacttctgagtgtaaggaaggagaggccagagaaaggaatttctgggtctgagggaggaggggctggggttctggacccctaggtctgagggaggaggggctggggcctggacccctgggtctgagggaggaggggctggggcctggactcctgggtctgtggggggaggggctggggcctggacccctgggtctgagtggggaggggctgggcctgaatgctttctccttctcagctccagcaggagaggcccttcctcgcctggcagcccctgagcggctcagcagggcaccatggcaagatcccttctcctgcccctgcagatcttactgctatccttagccttggaaactgcaggagaagaaggtgaaagctggactgggaagtctgacctcacctcagggcccccactgaccctctccaaggagtccctgagtcagaacccttccctcctcaaacagcttccatcctgggaggaccagactgtcggctgaagcccccgctcttcctgcttctgctgactcagggggtctctgtcccctccaggccctgcctcctgtgctcagggtctctctgtggttccccagatgagatgcgcctcctgggtttctgagtgggctccttctgtctgtctctatccctatctcttgctttctctgtatttctccacacattttcatctgtctctgtccatctctgactctgggaatccctgaggtgcagcctcagccttcccctaatgctagctacccacgtgctcctccatgtctccatccagcccagggtgacaagattattgatggcgccccatgtgcaagaggctcccacccatggcaggtggccctgctcagtggcaatcagctccactgcggaggcgtcctggtcaatgagcgctgggtgctcactgccgcccactgcaagatgaagtaggtgccgcccaagtctctgctggaggtgcaccagcgtctccagctcgctatgggggtggaagggcagtctttctgtgcctacggctctattctcctctctctgggtctctgtcctcctctctctgggcctctgtaccccctctccctggggctctgtccccctctctccctggctctctgtctccctctctctgggtctctgtccccctctctctggatctctgttcccctctctctgtgtctctgtcccccattctctctaggtctctgttccccctcctctctctctgggtctctgtccctctctctctggtctctgtccccctctctctctggatctctgtccccctctccctgggcctctgtaccccctctccctggggctctgtccccctctctctgggtctctgtctgcctttctctctggatctctgttcccctctgtgtctctgtccccttctctctccgggtctctgttccccctcctctctttctgggtctctgtccctctctctctgggtctctgtccccctctctctctggtctctgttccccctcctctctctctggtctctgtccctctctctctgggtctctgtcaccctctctctctgggtctctgtcaccctctctctctggtctctgttccccctcctctctctgtgggtctctgtccctctctctctgggtctctgttcccctctctctctggtctctgttccccctcctctctctctggatctctgtccccctctccctggggctctgtccccctctctccctggctctctgtcttcctctctctggggctctgtccccctctctctctggtctctgttcccctctctctgggtctctgtccctctctctctgggtctctgtccctctctctctggatctctgtccccctctctctctgggtctctgttcccctctctctgggtctctgtcccctctcctctctctgtgtctctctcccccctcctctctctgtgtctctgtcccccctcctatctctgtgtctctctcccccctcctctctctgggtctctgtccccccctctctgggtctctgtctccctctctctggggctctgtccccctctctctctggatctctgttcccctctctctgggtctctgtctcccctcctctctctgtgtctctgtcccccctcctctctctgggtctctgtccccaccccgtcccccaggtctttgcacaccctctctgtcacagtgtctcttctgaatctgtgaatgtcactcctcgcagtgagtacaccgtgcacctgggcagtgatacgctgggcgacaggagagctcagaggatcaaggcctcgaagtcattccgccaccccggctactccacacagacccatgttaatgacctcatgctcgtgaagctcaatagccaggccaggctgtcatccatggtgaagaaagtcaggctgccctcccgctgcgaaccccctggaaccacctgtactgtctccggctggggcactaccacgagcccagatggtaggtggcctcagtgacccaggagtgcaggccccagccctcctccctcagacccaggagtccaggcccccagcccctcctccctcagacccaggagtccaggcctcagcccctcctccctcagacccaggagtccaggcccccagcccctcctccctcagacccgggagtccagaccccagcccctcctccctcagacccagcagtcctgggccccagaccctcctccctcggaaccaggagcctgaacaacagcccttctggtcctcgcccccatcctctctgactgacagctctccctgctcctccctgcagtgacctttccctctgacctcatgtgcgtggatgtcaagctcatctccccccaggactgcacgaaggtttacaaggacttactggaaaattccatgctgtgcgctggcatccccgactccaagaaaaacgcctgcaatgtgagaccctcccccccaattcctccccagtcctgggtaccctgtctgcatgccccagggacagagcttgacccgagtgactgggtaccaagcccggccttgccctccccccaggcctggcctcctcagctttttccacctcattctctgcctaggtcaggggtgggagtttacttaggggccaatgtggccctggggatgagacagagagtttaataggggtgagaaagtgggggtgggaccagggaaggagactgaggtgctggcctcaggcccaaaccttaagggggcaccaaaaacctcagtgattgagataaatcataatgcaatatttaaaaataaaaataaaaactcatgcagaagtccatgatggacaaaatgtcacattttaaataaagagcaggtggatcttactgaattttcccttgccgtaagtactagcgtggctcagcacagcgctgtactggcactgtcttcatttaaaatgtggataccatgcccatcatgcagttttatgtattacatttgatttcgttaagtactgcattgaagtattgtgtattgcagttactgagattttgtgcctgaagctgatgactcactcacctgaccctggccctggtcccggggaaaacactctttctctccacctcctctctgttccctctttctggccttttgtcatcccctctgtttctgaacagtcttcccacatctctctttgtgacataatttcatttcattcttttcctctttgttttttctctgtgttgagctagcttgctctccctcccttgttctctctccatgccctcctctctgctctctgtcttctccctctttctcttgcttctctctctctcctcccctccctctctcctctccctgcccccctgctctctcttttttcctctctctctgtctcctctctggccctctcctctttctctctctcccccacttctctgtctctcttcatctctctccctcatctctccttgccccctcctttttactgtctctctctttctctttcttctatctctctcctctccctgccgctcccccatctctgtctttctttctctctctttattctcctcctctcttccagtctctctctcctctccccacccccaccccatctctctccccacaccttccccccctttctctttgtctctctcttctccctctttcttctccacccccatctctctctctcttctcttcccacaccctccccatctccctcatctctttgtctgtctctcttctccctccttcttttccacccccatctctctgtctctctctctccccataccctttccctcttcctcatctctctttgtctctctctcctttccctctttcttctccacctccaactctctctgtctctccacacccatcctccttgctcacatctgcaccttcagctgtcaggggatgtgggatggtgagtgttagggatagaggagatgggagagagatgactgtcctagagaatagggtgttccccttctcccctggtgagggccagtttcatgaatgtgcaagctctgcacggacacagagccccacactcagaagggtctcaaacttagtctaatgcattcctgctgttgtcttgaaattctcaataatttttgaacaaagggccctgcattttcgttttgcaccaagtcctgtaaattatgtaactggtcttcaccctggtctccgagaccatcgtgtccccctttcctgcgccacagggcacgcatccaccccttggagatgatgttccttctcccactagcttggagcagggtccttaacattggaaaataaagagtgctctgatcctggaagccccaccccttctctgcaattggtctcattggccaagggtcaaaccagtgtcttcaaaggacctagtgtgtccctagcactagctctcccattagtccccagagacaatgagtctcttctcattggctatggtggaagtccataatctgcaagacaaagaccgataactgaggaatgtatgagaatgagttgggctttgatctgaagccaaagttaatctccggctctattccctctagggtgactcagggggaccgttggtgtgcagaggtaccctgcaaggtctggtgtcctggggaactttcccttgcggccaacccaatgacccaggagtctacactcaagtgtgcaagttcaccaagtggataaatgacaccatgaaaaagcatcgctaacgccacactgagttaattaactgtgtgcttccaacagaaaatgcacaggagtgaggacgccgatgacctatgaagtcaaatttgactttacctttcctcaaagatatatttaaaccaacctcatgccctgttgataaaccaatcaaattggtaaagacctaaaaccaaaacaaataaagaaacacaaaaccctcagtgctggagaagagtcagtgagaccagcactctcaaacactggaactggacgttcgtacagtctttacggaagacacttggtcaacgtacaccgagacccttattcaccacctttgacccagtaactctaatcttaggaagaacctactgaaacaaaaaaaatccaaaatgtagaacaagacttgaatttaccatgatattatttatcacagaaatgaagtgaaaccatcaaacatgttccaaaagtaccagatggcttaaataatagtctggcttggcacaacgatgttttttttctttgagacagagtctctgttgcttgggctgcaatgcagtgatgcaatcttggctcactgcaacctccgcctcctgggttcaagtgattctcgtgcttcagcctcccaagtacctgggactacaggtgtgcaccaccacaccaggctaattttttgtgtatttttactagagacagggtttcaccatgttggccagcatggtcttgaacgcctgacctcagatgatccacccaccttggcctcccaaagtgctgggattacaggcatgagccaccacggccagcccacaatgatattacaaacctattaaaaatgatacttagacagaattgtcagtattattcaagaacatttaggctataggatgttaaatgacaaaaggaaggacaaaaatatatatgtatgtgaccctacccataaaaaatgaaatattcacagaatcagatctgaaaacacatgtcccagactgcatactggggtcgtcatgaggtgtctccttccttctgtgtacttttccttgaatgtgcacttttataacatgaaaaataaaggtggggaaaaaagtctgaagatctaa

SEQ ID NO: 7579 - DNA, 14 bp, Artificial Sequence
  Synthetic
aggattgatgtgat

SEQ ID NO: 7580 - DNA, 15 bp, Artificial Sequence
  Synthetic
gaggattgatgtgat

SEQ ID NO: 7581 - DNA, 16 bp, Artificial Sequence
  Synthetic
agaggattgatgtgat

SEQ ID NO: 7582 - DNA, 16 bp, Artificial Sequence
  Synthetic
gagaggattgatgtga

SEQ ID NO: 7583 - DNA, 15 bp, Artificial Sequence
  Synthetic
gagaggattgatgtg

SEQ ID NO: 7584 - DNA, 15 bp, Artificial Sequence
  Synthetic
tgagaggattgatgt

SEQ ID NO: 7585 - DNA, 14 bp, Artificial Sequence
  Synthetic
tgagaggattgatg

SEQ ID NO: 7586 - DNA, 14 bp, Artificial Sequence
  Synthetic
gtgagaggattgat

SEQ ID NO: 7587 - DNA, 14 bp, Artificial Sequence
  Synthetic
agtgagaggattga

SEQ ID NO: 7588 - DNA, 12 bp, Artificial Sequence
  Synthetic
gtgattgatgag

SEQ ID NO: 7589 - DNA, 13 bp, Artificial Sequence
  Synthetic
agtgattgatgag

SEQ ID NO: 7590 - DNA, 13 bp, Artificial Sequence
  Synthetic
gagtgattgatga

SEQ ID NO: 7591 - DNA, 13 bp, Artificial Sequence
  Synthetic
ggagtgattgatg

SEQ ID NO: 7592 - DNA, 13 bp, Artificial Sequence
  Synthetic
tggagtgattgat

SEQ ID NO: 7593 - DNA, 13 bp, Artificial Sequence
  Synthetic
gtggagtgattga

SEQ ID NO: 7594 - DNA, 14 bp, Artificial Sequence
  Synthetic
agtggagtgattga

SEQ ID NO: 7595 - DNA, 13 bp, Artificial Sequence
  Synthetic
agtggagtgattg

SEQ ID NO: 7596 - DNA, 14 bp, Artificial Sequence
  Synthetic
gagtggagtgattg

SEQ ID NO: 7597 - DNA, 10 bp, Artificial Sequence
  Synthetic
aaggtattga

SEQ ID NO: 7598 - DNA, 10 bp, Artificial Sequence
  Synthetic
gaaggtattg

SEQ ID NO: 7599 - DNA, 10 bp, Artificial Sequence
  Synthetic
agaaggtatt

SEQ ID NO: 7600 - DNA, 10 bp, Artificial Sequence
  Synthetic
gagaaggtat

SEQ ID NO: 7601 - DNA, 10 bp, Artificial Sequence
  Synthetic
tgagaaggta

SEQ ID NO: 7602 - DNA, 10 bp, Artificial Sequence
  Synthetic
gtgagaaggt

SEQ ID NO: 7603 - DNA, 11 bp, Artificial Sequence
  Synthetic
agtgagaaggt

SEQ ID NO: 7604 - DNA, 10 bp, Artificial Sequence
  Synthetic
agtgagaagg

SEQ ID NO: 7605 - DNA, 13 bp, Artificial Sequence
  Synthetic
aggtgaggtgtat

SEQ ID NO: 7606 - DNA, 12 bp, Artificial Sequence
  Synthetic
aggtgaggtgta

SEQ ID NO: 7607 - DNA, 12 bp, Artificial Sequence
  Synthetic
gaggtgaggtgt

SEQ ID NO: 7608 - DNA, 12 bp, Artificial Sequence
  Synthetic
tgaggtgaggtg

SEQ ID NO: 7609 - DNA, 11 bp, Artificial Sequence
  Synthetic
tgaggtgaggt

SEQ ID NO: 7610 - DNA, 11 bp, Artificial Sequence
  Synthetic
atgaggtgagg

SEQ ID NO: 7611 - DNA, 10 bp, Artificial Sequence
  Synthetic
atgaggtgag

SEQ ID NO: 7612 - DNA, 13 bp, Artificial Sequence
  Synthetic
tagaggaaaggta

SEQ ID NO: 7613 - DNA, 14 bp, Artificial Sequence
  Synthetic
gtagaggaaaggta

SEQ ID NO: 7614 - DNA, 14 bp, Artificial Sequence
  Synthetic
ggtagaggaaaggt

SEQ ID NO: 7615 - DNA, 15 bp, Artificial Sequence
  Synthetic
aggtagaggaaaggt

SEQ ID NO: 7616 - DNA, 15 bp, Artificial Sequence
  Synthetic
gaggtagaggaaagg

SEQ ID NO: 7617 - DNA, 15 bp, Artificial Sequence
  Synthetic
tgaggtagaggaaag

SEQ ID NO: 7618 - DNA, 15 bp, Artificial Sequence
  Synthetic
atgaggtagaggaaa

SEQ ID NO: 7619 - DNA, 14 bp, Artificial Sequence
  Synthetic
atgaggtagaggaa

SEQ ID NO: 7620 - DNA, 14 bp, Artificial Sequence
  Synthetic
aatgaggtagagga

SEQ ID NO: 7621 - DNA, 11 bp, Artificial Sequence
  Synthetic
tgagtaattga

SEQ ID NO: 7622 - DNA, 10 bp, Artificial Sequence
  Synthetic
tgagtaattg

SEQ ID NO: 7623 - DNA, 9 bp, Artificial Sequence
  Synthetic
ttgagtaat

SEQ ID NO: 7624 - DNA, 9 bp, Artificial Sequence
  Synthetic
gttgagtaa

SEQ ID NO: 7625 - DNA, 9 bp, Artificial Sequence
  Synthetic
ggttgagta

SEQ ID NO: 7626 - DNA, 10 bp, Artificial Sequence
  Synthetic
aggttgagta

SEQ ID NO: 7627 - DNA, 13 bp, Artificial Sequence
  Synthetic
gtgaagagagaat

SEQ ID NO: 7628 - DNA, 14 bp, Artificial Sequence
  Synthetic
ggtgaagagagaat

SEQ ID NO: 7629 - DNA, 14 bp, Artificial Sequence
  Synthetic
aggtgaagagagaa

SEQ ID NO: 7630 - DNA, 14 bp, Artificial Sequence
  Synthetic
gaggtgaagagaga

SEQ ID NO: 7631 - DNA, 14 bp, Artificial Sequence
  Synthetic
gggaggtgaagaga

SEQ ID NO: 7632 - DNA, 13 bp, Artificial Sequence
  Synthetic
tggaggtgaagag

SEQ ID NO: 7633 - DNA, 13 bp, Artificial Sequence
  Synthetic
ttggaggtgaaga

SEQ ID NO: 7634 - DNA, 11 bp, Artificial Sequence
  Synthetic
atagatttgga

SEQ ID NO: 7635 - DNA, 12 bp, Artificial Sequence
  Synthetic
aatagatttggg

SEQ ID NO: 7636 - DNA, 12 bp, Artificial Sequence
  Synthetic
taatagatttgg

SEQ ID NO: 7637 - DNA, 12 bp, Artificial Sequence
  Synthetic
gtaatagatttg

SEQ ID NO: 7638 - DNA, 12 bp, Artificial Sequence
  Synthetic
tgtaatagattt

SEQ ID NO: 7639 - DNA, 11 bp, Artificial Sequence
  Synthetic
tgtaatagatt

SEQ ID NO: 7640 - DNA, 10 bp, Artificial Sequence
  Synthetic
tgtaatagat

SEQ ID NO: 7641 - DNA, 10 bp, Artificial Sequence
  Synthetic
gtgtaataga

SEQ ID NO: 7642 - DNA, 11 bp, Artificial Sequence
  Synthetic
tgtgtaataga

SEQ ID NO: 7643 - DNA, 13 bp, Artificial Sequence
  Synthetic
aatgaggtagagg

SEQ ID NO: 7644 - DNA, 14 bp, Artificial Sequence
  Synthetic
gaatgaggtagagg

SEQ ID NO: 7645 - DNA, 13 bp, Artificial Sequence
  Synthetic
gaatgaggtagag

SEQ ID NO: 7646 - DNA, 13 bp, Artificial Sequence
  Synthetic
agaatgaggtaga

SEQ ID NO: 7647 - DNA, 12 bp, Artificial Sequence
  Synthetic
agaatgaggtag

SEQ ID NO: 7648 - DNA, 11 bp, Artificial Sequence
  Synthetic
agaatgaggta

SEQ ID NO: 7649 - DNA, 14 bp, Artificial Sequence
  Synthetic
aggatgggaggaat

SEQ ID NO: 7650 - DNA, 12 bp, Artificial Sequence
  Synthetic
aaggatgggagg

SEQ ID NO: 7651 - DNA, 12 bp, Artificial Sequence
  Synthetic
taaggatgggag

SEQ ID NO: 7652 - DNA, 12 bp, Artificial Sequence
  Synthetic
gtaaggatggga

SEQ ID NO: 7653 - DNA, 12 bp, Artificial Sequence
  Synthetic
ggtaaggatggg

SEQ ID NO: 7654 - DNA, 12 bp, Artificial Sequence
  Synthetic
aggtaaggatgg

SEQ ID NO: 7655 - DNA, 12 bp, Artificial Sequence
  Synthetic
tgcctgctgaga

SEQ ID NO: 7656 - DNA, 13 bp, Artificial Sequence
  Synthetic
ctgcctgctgaga

SEQ ID NO: 7657 - DNA, 16 bp, Artificial Sequence
  Synthetic
tttccctgcctgtgag

SEQ ID NO: 7658 - DNA, 16 bp, Artificial Sequence
  Synthetic
ttttccctgcctgtga

SEQ ID NO: 7659 - DNA, 15 bp, Artificial Sequence
  Synthetic
ttccttccctgctgt

SEQ ID NO: 7660 - DNA, 17 bp, Artificial Sequence
  Synthetic
ttggggctcttggttgt

SEQ ID NO: 7661 - DNA, 17 bp, Artificial Sequence
  Synthetic
gattggggctcttggtt

SEQ ID NO: 7662 - DNA, 17 bp, Artificial Sequence
  Synthetic
tgattggggctcttggt

SEQ ID NO: 7663 - DNA, 17 bp, Artificial Sequence
  Synthetic
gtgacttggggctttgg

SEQ ID NO: 7664 - DNA, 17 bp, Artificial Sequence
  Synthetic
aagtgcacttggggttt

SEQ ID NO: 7665 - DNA, 16 bp, Artificial Sequence
  Synthetic
tggtggatggttttgg

SEQ ID NO: 7666 - DNA, 17 bp, Artificial Sequence
  Synthetic
ttggctggatggttttg

SEQ ID NO: 7667 - DNA, 16 bp, Artificial Sequence
  Synthetic
gttggcctggatggtt

SEQ ID NO: 7668 - DNA, 16 bp, Artificial Sequence
  Synthetic
agttggcctggatggt

SEQ ID NO: 7669 - DNA, 17 bp, Artificial Sequence
  Synthetic
gagttggcctggatggt

SEQ ID NO: 7670 - DNA, 19 bp, Artificial Sequence
  Synthetic
aggagttggcctggatggt

SEQ ID NO: 7671 - DNA, 19 bp, Artificial Sequence
  Synthetic
taggagttggcctggatgg

SEQ ID NO: 7672 - DNA, 15 bp, Artificial Sequence
  Synthetic
atcaacatctctgga

SEQ ID NO: 7673 - DNA, 17 bp, Artificial Sequence
  Synthetic
aattctcaacatcttgg

SEQ ID NO: 7674 - DNA, 18 bp, Artificial Sequence
  Synthetic
aaattctcaacatcttgg

SEQ ID NO: 7675 - DNA, 17 bp, Artificial Sequence
  Synthetic
gaaattctcaacatttg

SEQ ID NO: 7676 - DNA, 18 bp, Artificial Sequence
  Synthetic
atgaacattctcaacatt

SEQ ID NO: 7677 - DNA, 18 bp, Artificial Sequence
  Synthetic
gatgaacattctcaaatt

SEQ ID NO: 7678 - DNA, 18 bp, Artificial Sequence
  Synthetic
agatgaacattctcaaat

SEQ ID NO: 7679 - DNA, 18 bp, Artificial Sequence
  Synthetic
agagatgaacattctaaa

SEQ ID NO: 7680 - DNA, 18 bp, Artificial Sequence
  Synthetic
gagagatgaacattctaa

SEQ ID NO: 7681 - DNA, 18 bp, Artificial Sequence
  Synthetic
ggagagatgaacatttaa

SEQ ID NO: 7682 - DNA, 18 bp, Artificial Sequence
  Synthetic
tggagagatgaacattta

SEQ ID NO: 7683 - DNA, 16 bp, Artificial Sequence
  Synthetic
gtggagagatgaacat

SEQ ID NO: 7684 - DNA, 15 bp, Artificial Sequence
  Synthetic
ggtggagagatgaaa

SEQ ID NO: 7685 - DNA, 17 bp, Artificial Sequence
  Synthetic
ggtggagagatgaaatt

SEQ ID NO: 7686 - DNA, 16 bp, Artificial Sequence
  Synthetic
gaaccccgccctggaa

SEQ ID NO: 7687 - DNA, 16 bp, Artificial Sequence
  Synthetic
agagcaaccccgctgg

SEQ ID NO: 7688 - DNA, 15 bp, Artificial Sequence
  Synthetic
gagagcaaccccgtg

SEQ ID NO: 7689 - DNA, 16 bp, Artificial Sequence
  Synthetic
ttgagacgcaaccccg

SEQ ID NO: 7690 - DNA, 18 bp, Artificial Sequence
  Synthetic
agacctgagtccaggaga

SEQ ID NO: 7691 - DNA, 17 bp, Artificial Sequence
  Synthetic
aaatctctggaaggaat

SEQ ID NO: 7692 - DNA, 16 bp, Artificial Sequence
  Synthetic
ttaggaagtgcattgg

SEQ ID NO: 7693 - DNA, 16 bp, Artificial Sequence
  Synthetic
agcagaggacaatgag

SEQ ID NO: 7694 - DNA, 17 bp, Artificial Sequence
  Synthetic
tttccctgcctgctgag

SEQ ID NO: 7695 - RNA, 20 nt, Artificial Sequence
  Synthetic
uccuucccugccugcugagc

SEQ ID NO: 7696 - DNA, 14 bp, Artificial Sequence
  Synthetic
uuccctgcctgcug

SEQ ID NO: 7697 - DNA, 17 bp, Artificial Sequence
  Synthetic
cuuccctgcctgcugag

SEQ ID NO: 7698 - DNA, 23 bp, Artificial Sequence
  Synthetic
cuccuuccctgcctgcugagcca

SEQ ID NO: 7699 - DNA, 26 bp, Artificial Sequence
  Synthetic
cucuccuuccctgcctgcugagccac

SEQ ID NO: 7700 - DNA, 18 bp, Artificial Sequence
  Synthetic
gacttggggctcttggtt

SEQ ID NO: 7701 - DNA, 19 bp, Artificial Sequence
  Synthetic
gcacutggggctctugguu

SEQ ID NO: 7702 - DNA, 19 bp, Artificial Sequence
  Synthetic
gcacuuggggctcuugguu

SEQ ID NO: 7703 - DNA, 13 bp, Artificial Sequence
  Synthetic
cutggggctctug

SEQ ID NO: 7704 - DNA, 22 bp, Artificial Sequence
  Synthetic
ugcacutggggctctugguugu

SEQ ID NO: 7705 - DNA, 25 bp, Artificial Sequence
  Synthetic
agugcacutggggctctugguuguc

SEQ ID NO: 7706 - RNA, 20 nt, Artificial Sequence
  Synthetic
gaguuggccuggaugguuuc

SEQ ID NO: 7707 - DNA, 20 bp, Artificial Sequence
  Synthetic
gaguuggcctggaugguuuc

SEQ ID NO: 7708 - DNA, 23 bp, Artificial Sequence
  Synthetic
gaguuggcctggatggugguuuc

SEQ ID NO: 7709 - DNA, 14 bp, Artificial Sequence
  Synthetic
uuggcctggatggu

SEQ ID NO: 7710 - DNA, 17 bp, Artificial Sequence
  Synthetic
guuggcctggatgguuu

SEQ ID NO: 7711 - DNA, 26 bp, Artificial Sequence
  Synthetic
caggaguuggcctggatgguuuccug

SEQ ID NO: 7712 - DNA, 17 bp, Artificial Sequence
  Synthetic
tgaaattctcaacattt

SEQ ID NO: 7713 - DNA, 20 bp, Artificial Sequence
  Synthetic
ugaacautctcaacaucucu

SEQ ID NO: 7714 - RNA, 20 nt, Artificial Sequence
  Synthetic
ugaacauucucaacaucucu

SEQ ID NO: 7715 - DNA, 14 bp, Artificial Sequence
  Synthetic
acattctcaacauc

SEQ ID NO: 7716 - DNA, 23 bp, Artificial Sequence
  Synthetic
augaacattctcaacaucucugg

SEQ ID NO: 7717 - DNA, 26 bp, Artificial Sequence
  Synthetic
agaugaacattctcaacaucucuggg

SEQ ID NO: 7718 - DNA, 19 bp, Artificial Sequence
  Synthetic
tgaacattctcaacatctt

SEQ ID NO: 7719 - DNA, 23 bp, Artificial Sequence
  Synthetic
ugaacauuctcaacatcaucucu

SEQ ID NO: 7720 - DNA, 15 bp, Artificial Sequence
  Synthetic
tggagagatgaacat

SEQ ID NO: 7721 - DNA, 17 bp, Artificial Sequence
  Synthetic
tggagagatgaacattt

SEQ ID NO: 7722 - DNA, 23 bp, Artificial Sequence
  Synthetic
cuggagagatgaacatcauucuc

SEQ ID NO: 7723 - DNA, 17 bp, Artificial Sequence
  Synthetic
ggagagatgaacauucu

SEQ ID NO: 7724 - DNA, 23 bp, Artificial Sequence
  Synthetic
gcuggagagatgaacauucucaa

SEQ ID NO: 7725 - DNA, 26 bp, Artificial Sequence
  Synthetic
gggcuggagagatgaacauucucaac

SEQ ID NO: 7726 - DNA, 18 bp, Artificial Sequence
  Synthetic
gagacgcaaccccgcctg

SEQ ID NO: 7727 - RNA, 19 nt, Artificial Sequence
  Synthetic
gagacgcaaccccgcccug

SEQ ID NO: 7728 - RNA, 22 nt, Artificial Sequence
  Synthetic
gagacgcaaccccgccgcccug

SEQ ID NO: 7729 - RNA, 22 nt, Artificial Sequence
  Synthetic
ugagacgcaaccccgcccugga

SEQ ID NO: 7730 - RNA, 25 nt, Artificial Sequence
  Synthetic
auugagacgcaaccccgcccuggac

SEQ ID NO: 7731 - DNA, 16 bp, Artificial Sequence
  Synthetic
gagaggatctgatgtg

SEQ ID NO: 7732 - DNA, 17 bp, Artificial Sequence
  Synthetic
cgagaggatctgaugug

SEQ ID NO: 7733 - RNA, 17 nt, Artificial Sequence
  Synthetic
cgagaggaucugaugug

SEQ ID NO: 7734 - DNA, 11 bp, Artificial Sequence
  Synthetic
gaggatctgat

SEQ ID NO: 7735 - DNA, 14 bp, Artificial Sequence
  Synthetic
agaggatctgatgu

SEQ ID NO: 7736 - DNA, 20 bp, Artificial Sequence
  Synthetic
ucgagaggatctgatgugau

SEQ ID NO: 7737 - DNA, 23 bp, Artificial Sequence
  Synthetic
gcucgagaggatctgatgugauc

SEQ ID NO: 7738 - DNA, 16 bp, Artificial Sequence
  Synthetic
tggagctgattgccat

SEQ ID NO: 7739 - RNA, 17 nt, Artificial Sequence
  Synthetic
uggagcugauugccacu

SEQ ID NO: 7740 - DNA, 11 bp, Artificial Sequence
  Synthetic
agctgattgcc

SEQ ID NO: 7741 - DNA, 14 bp, Artificial Sequence
  Synthetic
gagctgattgccac

SEQ ID NO: 7742 - DNA, 20 bp, Artificial Sequence
  Synthetic
guggagctgattgccacuga

SEQ ID NO: 7743 - DNA, 23 bp, Artificial Sequence
  Synthetic
caguggagctgattgccacugag

SEQ ID NO: 7744 - DNA, 14 bp, Artificial Sequence
  Synthetic
gagacccaggctat

SEQ ID NO: 7745 - DNA, 15 bp, Artificial Sequence
  Synthetic
gagcacccaggctat

SEQ ID NO: 7746 - DNA, 16 bp, Artificial Sequence
  Synthetic
gagcacccaggctcau

SEQ ID NO: 7747 - RNA, 16 nt, Artificial Sequence
  Synthetic
gagcacccaggcucau

SEQ ID NO: 7748 - RNA, 17 nt, Artificial Sequence
  Synthetic
gagcacccagcgcucau

SEQ ID NO: 7749 - DNA, 13 bp, Artificial Sequence
  Synthetic
gcacccaggctca

SEQ ID NO: 7750 - DNA, 19 bp, Artificial Sequence
  Synthetic
ugagcacccaggctcauug

SEQ ID NO: 7751 - DNA, 22 bp, Artificial Sequence
  Synthetic
agugagcacccaggctcauuga

SEQ ID NO: 7752 - DNA, 13 bp, Artificial Sequence
  Synthetic
gaggtgcaggtgt

SEQ ID NO: 7753 - DNA, 14 bp, Artificial Sequence
  Synthetic
gcaggtgcaggtgt

SEQ ID NO: 7754 - DNA, 16 bp, Artificial Sequence
  Synthetic
gcccaggtgcaggugu

SEQ ID NO: 7755 - RNA, 16 nt, Artificial Sequence
  Synthetic
gcccaggugcaggugu

SEQ ID NO: 7756 - RNA, 17 nt, Artificial Sequence
  Synthetic
gcccaggugcacggugu

SEQ ID NO: 7757 - DNA, 10 bp, Artificial Sequence
  Synthetic
caggtgcagg

SEQ ID NO: 7758 - DNA, 13 bp, Artificial Sequence
  Synthetic
ccaggtgcaggug

SEQ ID NO: 7759 - DNA, 19 bp, Artificial Sequence
  Synthetic
ugcccaggtgcagguguac

SEQ ID NO: 7760 - DNA, 22 bp, Artificial Sequence
  Synthetic
acugcccaggtgcagguguacu

SEQ ID NO: 7761 - DNA, 16 bp, Artificial Sequence
  Synthetic
gaggtcagaggaaagg

SEQ ID NO: 7762 - RNA, 16 nt, Artificial Sequence
  Synthetic
gaggucagaggaaagg

SEQ ID NO: 7763 - DNA, 10 bp, Artificial Sequence
  Synthetic
gtcagaggaa

SEQ ID NO: 7764 - DNA, 13 bp, Artificial Sequence
  Synthetic
ggtcagaggaaag

SEQ ID NO: 7765 - DNA, 19 bp, Artificial Sequence
  Synthetic
ugaggtcagaggaaagguc

SEQ ID NO: 7766 - DNA, 22 bp, Artificial Sequence
  Synthetic
caugaggtcagaggaaagguca

SEQ ID NO: 7767 - DNA, 14 bp, Artificial Sequence
  Synthetic
tccctgagtcacat

SEQ ID NO: 7768 - RNA, 17 nt, Artificial Sequence
  Synthetic
ucccccugagucaccau

SEQ ID NO: 7769 - DNA, 11 bp, Artificial Sequence
  Synthetic
ccctgagtcac

SEQ ID NO: 7770 - DNA, 14 bp, Artificial Sequence
  Synthetic
cccctgagtcacca

SEQ ID NO: 7771 - DNA, 20 bp, Artificial Sequence
  Synthetic
guccccctgagtcaccauug

SEQ ID NO: 7772 - DNA, 23 bp, Artificial Sequence
  Synthetic
cgguccccctgagtcaccauugc

SEQ ID NO: 7773 - DNA, 16 bp, Artificial Sequence
  Synthetic
ggaggctgaagcagag

SEQ ID NO: 7774 - RNA, 17 nt, Artificial Sequence
  Synthetic
ggaggcugaagcacgag

SEQ ID NO: 7775 - DNA, 11 bp, Artificial Sequence
  Synthetic
ggctgaagcac

SEQ ID NO: 7776 - DNA, 13 bp, Artificial Sequence
  Synthetic
aggctgaagcaga

SEQ ID NO: 7777 - DNA, 19 bp, Artificial Sequence
  Synthetic
gggaggctgaagcagagaa

SEQ ID NO: 7778 - DNA, 22 bp, Artificial Sequence
  Synthetic
uugggaggctgaagcagagaau

SEQ ID NO: 7779 - RNA, 17 nt, Artificial Sequence
  Synthetic
uguaaucccagcacuuu

SEQ ID NO: 7780 - DNA, 11 bp, Artificial Sequence
  Synthetic
aatcccagcac

SEQ ID NO: 7781 - DNA, 14 bp, Artificial Sequence
  Synthetic
uaatcccagcacuu

SEQ ID NO: 7782 - DNA, 20 bp, Artificial Sequence
  Synthetic
cuguaatcccagcacuuugg

SEQ ID NO: 7783 - DNA, 16 bp, Artificial Sequence
  Synthetic
tgaggtcagaggaaag

SEQ ID NO: 7784 - RNA, 16 nt, Artificial Sequence
  Synthetic
ugaggucagaggaaag

SEQ ID NO: 7785 - DNA, 16 bp, Artificial Sequence
  Synthetic
ugaggtcagaggaaag

SEQ ID NO: 7786 - RNA, 10 nt, Artificial Sequence
  Synthetic
ggucagagga

SEQ ID NO: 7787 - RNA, 13 nt, Artificial Sequence
  Synthetic
gaggucagaggaa

SEQ ID NO: 7788 - DNA, 16 bp, Artificial Sequence
  Synthetic
gcacatgaggtagagg

SEQ ID NO: 7789 - RNA, 11 nt, Artificial Sequence
  Synthetic
caugaggucag

SEQ ID NO: 7790 - RNA, 14 nt, Artificial Sequence
  Synthetic
cacaugaggucaga

SEQ ID NO: 7791 - RNA, 20 nt, Artificial Sequence
  Synthetic
acgcacaugaggucagaggg

SEQ ID NO: 7792 - RNA, 23 nt, Artificial Sequence
  Synthetic
cacgcacaugaggucagagggaa

SEQ ID NO: 7793 - DNA, 14 bp, Artificial Sequence
  Synthetic
tacaggactgggag

SEQ ID NO: 7794 - RNA, 16 nt, Artificial Sequence
  Synthetic
uacccaggacugggag

SEQ ID NO: 7795 - DNA, 16 bp, Artificial Sequence
  Synthetic
uacccaggactgggag

SEQ ID NO: 7796 - RNA, 10 nt, Artificial Sequence
  Synthetic
ccaggacugg

SEQ ID NO: 7797 - RNA, 13 nt, Artificial Sequence
  Synthetic
acccaggacuggg

SEQ ID NO: 7798 - DNA, 14 bp, Artificial Sequence
  Synthetic
gcacccagcgctca

SEQ ID NO: 7799 - DNA, 11 bp, Artificial Sequence
  Synthetic
caggtgcacgg

SEQ ID NO: 7800 - DNA, 11 bp, Artificial Sequence
  Synthetic
gtcagagggaa

SEQ ID NO: 7801 - DNA, 14 bp, Artificial Sequence
  Synthetic
ggtcagagggaaag

SEQ ID NO: 7802 - DNA, 14 bp, Artificial Sequence
  Synthetic
aggctgaagcacga

SEQ ID NO: 7803 - DNA, 20 bp, Artificial Sequence
  Synthetic
gggaggctgaagcacgagaa

SEQ ID NO: 7804 - DNA, 17 bp, Artificial Sequence
  Synthetic
agaggacagagggaaag

SEQ ID NO: 7805 - DNA, 17 bp, Artificial Sequence
  Synthetic
agaggtcagagggaaag

SEQ ID NO: 7806 - DNA, 11 bp, Artificial Sequence
  Synthetic
ggacagaggga

SEQ ID NO: 7807 - DNA, 14 bp, Artificial Sequence
  Synthetic
gaggacagagggaa

SEQ ID NO: 7808 - DNA, 19 bp, Artificial Sequence
  Synthetic
gggccatccacagtcttct

SEQ ID NO: 7809 - DNA, 23 bp, Artificial Sequence
  Synthetic
gagttggcctggatggtggtttc

SEQ ID NO: 7810 - DNA, 23 bp, Artificial Sequence
  Synthetic
gagacgcaacccccgccgccctg

SEQ ID NO: 7811 - DNA, 14 bp, Artificial Sequence
  Synthetic
ttggcctggatggt

SEQ ID NO: 7812 - DNA, 14 bp, Artificial Sequence
  Synthetic
acattctcaacatc

SEQ ID NO: 7813 - DNA, 23 bp, Artificial Sequence
  Synthetic
tgagacgcaacccccgccctgga

SEQ ID NO: 7814 - DNA, 26 bp, Artificial Sequence
  Synthetic
caggagttggcctggatggtttcctg

SEQ ID NO: 7815 - DNA, 11 bp, Artificial Sequence
  Synthetic
ttttgtgtgag

SEQ ID NO: 7816 - DNA, 13 bp, Artificial Sequence
  Synthetic
tttttgtgtgaga

SEQ ID NO: 7817 - DNA, 11 bp, Artificial Sequence
  Synthetic
tttttgtgtga

SEQ ID NO: 7818 - DNA, 13 bp, Artificial Sequence
  Synthetic
atttttgtgtgag

SEQ ID NO: 7819 - DNA, 14 bp, Artificial Sequence
  Synthetic
agagaggaaatgag

SEQ ID NO: 7820 - DNA, 15 bp, Artificial Sequence
  Synthetic
ttggggtttggttgt

SEQ ID NO: 7821 - DNA, 15 bp, Artificial Sequence
  Synthetic
gattggggtttggtt

SEQ ID NO: 7822 - DNA, 15 bp, Artificial Sequence
  Synthetic
ttaggaagtgattgg

SEQ ID NO: 7823 - DNA, 14 bp, Artificial Sequence
  Synthetic
agttggtggatggt

SEQ ID NO: 7824 - DNA, 17 bp, Artificial Sequence
  Synthetic
gagttggtggatggttt

SEQ ID NO: 7825 - DNA, 13 bp, Artificial Sequence
  Synthetic
aatttaaatttgg

SEQ ID NO: 7826 - DNA, 14 bp, Artificial Sequence
  Synthetic
aatttaaatttggg

SEQ ID NO: 7827 - DNA, 19 bp, Artificial Sequence
  Synthetic
tgaaatttaaatttggaag

SEQ ID NO: 7828 - DNA, 14 bp, Artificial Sequence
  Synthetic
tgaaatttaaattt

SEQ ID NO: 7829 - DNA, 19 bp, Artificial Sequence
  Synthetic
agatgaaatttaaatttgg

SEQ ID NO: 7830 - DNA, 20 bp, Artificial Sequence
  Synthetic
agatgaaatttaaatttggg

SEQ ID NO: 7831 - DNA, 14 bp, Artificial Sequence
  Synthetic
tggagagatgaaat

SEQ ID NO: 7832 - DNA, 16 bp, Artificial Sequence
  Synthetic
tggagagatgaaattt

SEQ ID NO: 7833 - DNA, 17 bp, Artificial Sequence
  Synthetic
gtggagagatgaaattt

SEQ ID NO: 7834 - DNA, 14 bp, Artificial Sequence
  Synthetic
agatgagtaggaga

SEQ ID NO: 7835 - DNA, 9 bp, Artificial Sequence
  Synthetic
gaagtggaa

SEQ ID NO: 7836 - DNA, 10 bp, Artificial Sequence
  Synthetic
gagagaagtg

SEQ ID NO: 7837 - DNA, 26 bp, Artificial Sequence
  Synthetic
ctctccttccctgcctgctgagccac

SEQ ID NO: 7838 - DNA, 26 bp, Artificial Sequence
  Synthetic
acctctccttccctgcctgctgagcc

SEQ ID NO: 7839 - DNA, 26 bp, Artificial Sequence
  Synthetic
tgaacattctcaacatctctgggaag

SEQ ID NO: 7840 - DNA, 26 bp, Artificial Sequence
  Synthetic
agatgaacattctcaacatctctggg

SEQ ID NO: 7841 - DNA, 16 bp, Artificial Sequence
  Synthetic
agaatgaggtagagga

SEQ ID NO: 7842 - DNA, 14 bp, Artificial Sequence
  Synthetic
ggaggtgaagagag

SEQ ID NO: 7843 - DNA, 19 bp, Artificial Sequence
  Synthetic
atgaggtagaggaaaggta

SEQ ID NO: 7844 - DNA, 17 bp, Artificial Sequence
  Synthetic
agaatgaggtagaggaa

SEQ ID NO: 7845 - DNA, 23 bp, Artificial Sequence
  Synthetic
catgaggtcagagggaaaggtca

SEQ ID NO: 7846 - DNA, 23 bp, Artificial Sequence
  Synthetic
cacgcacatgaggtcagagggaa

SEQ ID NO: 7847 - DNA, 23 bp, Artificial Sequence
  Synthetic
ccacgcacatgaggtcagaggga

SEQ ID NO: 7848 - DNA, 23 bp, Artificial Sequence
  Synthetic
caaggtcatccatgacaactttg

SEQ ID NO: 7849 - DNA, 25 bp, Artificial Sequence
  Synthetic
accacagtccatgccatcactgcca

SEQ ID NO: 7850 - DNA, 11 bp, Artificial Sequence
  Synthetic
ggtcagaggga

SEQ ID NO: 7851 - DNA, 14 bp, Artificial Sequence
  Synthetic
gaggtcagagggaa
